(19) United States
(12) Patent Application Publication
(10) Pub. No.: US 2023/0119715 A1
(43) Pub. Date: Apr. 20, 2023

(54) LEVENSHTEIN DISTANCE-BASED IRES SCREENING METHOD AND POLYNUCLEOTIDE SCREENED BASED ON SAME

(71) Applicant: Purecodon (Hong Kong) Biopharma Ltd., Hong Kong (CN)

(72) Inventors: Qiangbo HOU, Suzhou (CN); Jiafeng ZHU, Suzhou (CN); Zonghao QIU, Suzhou (CN); Chijian ZUO, Suzhou (CN); Zhenhua SUN, Suzhou (CN)

(21) Appl. No.: 17/964,598

(22) Filed: Oct. 12, 2022

(30) Foreign Application Priority Data
Oct. 12, 2021 (CN) 202111185073.9
Nov. 29, 2021 (CN) 202111435528.8

(51) Int. Cl. G16B 35/20; C12Q 1/6827; C12Q 1/6853; G16B 30/10

(52) U.S. Cl. CPC G16B 35/20; C12Q 1/6827; C12Q 1/6853; G16B 30/10; C12Q 2600/156

(57) ABSTRACT

The disclosure belongs to the technical field of bioinformatics and bioengineering, and specifically, relates to a Levenshtein distance-based IRES screening method, a polynucleotide screened based on this method, a circular nucleic acid molecule including the polynucleotide, a cyclization precursor nucleic acid molecule, a recombinant nucleic acid molecule, a recombinant expression vector, a recombinant host cell, and use. In the disclosure, averages of Levenshtein distances between all sample sequences and to-be-predicted sequences are compared, to efficiently and accurately determine whether there is an IRES in the to-be-predicted sequence, which has advantages of high efficiency and an accurate screening result. In addition, the IRES screened by the IRES prediction method provided by the disclosure has high activity, thereby providing abundant translation initiation elements for application of the circular nucleic acid molecule in preparing a protein, serving as vaccines, producing a therapeutic protein, or serving as a means of gene therapy, etc.

### CROSS-REFERENCE TO RELATED APPLICATION

[0001] The present application is based upon and claims the benefit of a priority of Chinese Patent Application No. 202111185073.9, filed on Oct. 12, 2021, and a priority of Chinese Patent Application No. 202111435528.8, filed on Nov. 29, 2021, the entire contents of which are incorporated herein by reference.

### SEQUENCE LISTING

[0002] This applications contains a sequence listing that has been submitted electronically in XML format and is hereby incorporated by reference in its entirety. Said XML file is named 53596-0007001_SL_ST26.xml. The XML file, created on Oct. 11, 2022, is 964,919 bytes in size.

### TECHNICAL FIELD

[0003] The disclosure belongs to the technical field of bioinformatics and bioengineering, and specifically, the disclosure relates to use of a polynucleotide in initiating translation of a circular nucleic acid molecule, a polynucleotide having an activity of initiating translation of a circular nucleic acid molecule, a circular nucleic acid molecule including the polynucleotide, a cyclization precursor nucleic acid molecule, a recombinant nucleic acid molecule, a recombinant expression vector, a recombinant host cell, and use.

### BACKGROUND

[0004] A messenger ribonucleic acid (mRNA) is transcribed from DNA and provides genetic information required for the next protein translation. When mRNA for encoding an antigenic protein is injected into the human body, the antigenic protein can be synthesized in the body, thereby inducing intense cellular and humoral immune responses and showing a characteristic of an autoimmune adjuvant, which makes the mRNA an excellent vaccine means. In addition, the mRNA has many other advantages as a vaccine or for production of a therapeutic protein. For example, compared with a DNA vector, the mRNA is transiently expressed in cells, without a risk of integration into a genome or dependence on a cell cycle, and therefore, the mRNA is much safer; compared with a viral vector, the mRNA does not have a feature of immune resistance caused by the vector itself, and therefore, protein is easier to express; and compared with a recombinant protein, a virus, and the like, a cell-free system is used during a production process of the mRNA, which only involves an in vitro enzyme-catalyzed reaction, resulting in a simpler and more controllable production process with lower costs. Currently, the mRNA shows a wide range of application potentials in serving as the vaccine, producing the therapeutic protein, serving as a means of gene therapy, and the like.

[0005] Currently, mRNAs for clinical or preclinical use are mainly linear mRNAs, and a structure of the linear mRNA includes a 5′ cap structure, a 3′ polyadenosine tail (PolyA tail), a 5′ untranslational region (5′ UTR), a 3′ untranslational region (3′ UTR), an open reading frame (ORF), and the like. The 5′ cap structure is an essential feature of eukaryotic mRNA and is obtained by adding N7-methylguanosine to a 5′ end of the mRNA. Studies have shown that the 5′ cap structure is bound to a translation initiation complex eif4E to promote mRNA translation, and can effectively prevent mRNA degradation and reduce immunogenicity of the mRNA. A main function of the 3′ polyadenosine tail is to bind to polyA binding protein (PABP) that interacts with eiF4G and eiF4E to mediate formation of circular mRNA, promote the translation, and prevent the mRNA degradation. The 5′ and 3′ untranslational regions, such as 5′ and 3′ untranslational regions using beta-globin, can effectively prevent mRNA degradation and promote translation from the mRNA to the protein.

[0006] Circular RNAs (circRNAs) are a common type of RNAs in eukaryotes. Natural circRNAs are mainly produced through a molecular mechanism referred to as “back splicing” in cells. Currently, it has been found that eukaryotic circRNAs have a variety of molecular and cellular regulatory functions. For example, the circular RNA can be bound to microRNAs (miRNAs) to regulate expression of target genes; and the circular RNA can be directly bound to a target protein to regulate gene expression, and the like. Currently identified circular RNAs mainly function as non-coding RNAs. However, circular RNAs capable of encoding proteins also exist in nature, namely, circular mRNAs. The circular mRNAs tend to have a longer half-life due to their circular properties, and therefore, it is speculated that the circular mRNAs may be more stable. Methods of forming the circular RNA in vitro include a chemical method, a protease catalysis method, a ribozyme catalysis method, and the like.

[0007] An internal ribosome entry site (IRES) is a cis-acting RNA sequence capable of recruiting ribosomal subunits to a translation initiation site of the mRNA independently of the 5′ cap structure, to mediate translation processes of viruses, some eukaryotes, and the like. The circular RNAs have a closed ring structure and lack typical translation initiation elements, but the circular RNAs can still implement a translation function by mediating the binding of ribosomes to the mRNAs by using the IRESs. Compared with linear mRNA, circular mRNA molecules have high stability and have important application prospects in protein expression and clinical treatment. A protein expression level of the circular mRNA molecules is affected by the translation initiation element. Therefore, finding more IRES elements that can initiate translation of the circular mRNA molecules is of great significance for improvement of the protein expression level of the circular mRNA molecules and expansion of application of the circular mRNA molecules to clinical and industrial production.

[0008] Currently, because confirmation, mechanism of action studies and structure studies of the IRESs in sequences mainly rely on experimental verification and it takes a lot of time and costs to screen out active IRES sequences from a large number of sequences with unknown functions, currently, a few IRESs are discovered and verified, which limits the application of the circular RNA molecules in protein expression, clinical treatment, and the like.

### SUMMARY

### Problems to be Solved in the Present Invention

[0009] In view of the problems existing in the prior art, for example, the screening of sequences containing an IRES is time-consuming and costly, resulting in a small number of verified IRES sequences at present, which limits the application of circular mRNA molecules in protein expression, clinical treatment, etc. For this purpose, the disclosure provides a Levenshtein distance-based IRES screening method, which can efficiently and rapidly screen a to-be-predicted sequence containing the IRES, and the screening results are accurate, which is conducive to the discovery of new IRES sequences.

[0010] In some embodiments, the disclosure provides a polynucleotide including any one nucleotide sequence shown in (i), where the polynucleotide is capable of initiating a translation process of a circular nucleic acid molecule, has high IRES activity, and is capable of improving the protein expression level of the circular nucleic acid molecule, which provides abundant translation initiation elements for the further application of the circular nucleic acid molecule.

### Solutions for Solving the Problems

[0011] According to a first aspect, the disclosure provides a Levenshtein distance-based IRES screening method, including the following steps:

(1) selecting n sequences including an IRES as sample sequences, where n≥1 and n is a natural number;
(2) subjecting the sample sequences and to-be-predicted sequences to one-hot encoding respectively, where categorical variables are A, T, C, and G;
(3) traversing the sample sequences, and calculating a Levenshtein distance between each sample sequence and the to-be-predicted sequence;
(4) calculating an average of Levenshtein distances between all sample sequences and the to-be-predicted sequences; and
(5) determining, based on the average, whether the to-be-predicted sequences include the IRES.

[0012] In some embodiments, according to the Levenshtein distance-based IRES screening method in the disclosure, in the step (5), if the average is not less than a set prediction threshold, it is determined that the to-be-predicted sequence includes the IRES, otherwise it is determined that the to-be-predicted sequence includes no IRES.

[0013] In some embodiments, according to the Levenshtein distance-based IRES screening method in the disclosure, the prediction threshold is not less than 0.5.

[0014] In some embodiments, according to the Levenshtein distance-based IRES screening method in the disclosure, the prediction threshold is 0.75.

[0015] In some embodiments, according to the Levenshtein distance-based IRES screening method in the disclosure, the method further includes the following step of:

traversing sample sequences if the to-be-predicted sequence is determined to include the IRES to separately find a longest common substring of each sample sequence and the to-be-predicted sequence.

[0016] In some embodiments, according to the Levenshtein distance-based IRES screening method in the disclosure, the method further includes the following steps of: predicting a secondary structure of the to-be-predicted sequence determined to include the IRES, and determining a position of the IRES in the to-be-predicted sequence in combination with the longest common substring.

[0017] In some embodiments, according to the Levenshtein distance-based IRES screening method in the disclosure, predicting the secondary structure of the to-be-predicted sequence determined to include the IRES includes: predicting, by using at least one of RNAfold, Mfold, RNAfoldweerver, and Vienna RNA software, the secondary structure of the to-be-predicted sequence determined to include the IRES.

[0018] In some embodiments, according to the Levenshtein distance-based IRES screening method in the disclosure, the secondary structure of the to-be-predicted sequence determined to include the IRES is predicted by using RNAfold software.

[0019] In some embodiments, according to the Levenshtein distance-based IRES screening method in the disclosure, the method further includes the following steps: subjecting the to-be-predicted sequence determined to include the IRES to experimental verification to determine the IRES activity of the to-be-predicted sequence.

[0020] In some embodiments, according to the Levenshtein distance-based IRES screening method in the disclosure, the experimental verification include the steps of:

constructing a circular nucleic acid molecule by using the to-be-predicted sequence determined to include the IRES, where in the circular nucleic acid molecule, the to-be-predicted sequence is operably linked to a nucleotide sequence encoding a fluorescent protein; and
obtaining a fluorescence signal released by the circular nucleic acid molecule, and determining the IRES activity of the to-be-predicted sequence based on the fluorescence signal.

[0021] According to a second aspect, the disclosure provides a polynucleotide, where the polynucleotide is selected from at least one of the group consisting of (i) to (iv):

(i) including a nucleotide sequence shown in any one of SEQ ID NOs: 1, 2, 3, 4, 9, 10, 11, 13, 14, 15, 17, 18, 19, 20, 25, 26, 27, 28, 41, 42, 45, 46, 51, 56, 59, 72, 79, 91, 98, 101, 104, 106, 107, 110, 115, 116, 117, 118, 119, 122, 123, 125, 127, 129, 130, 135, 139, 165, 179, 180, 183, 186, 188, 198, 200, 215, 216, 217, 218, 219, 220, 221, 222, 223, 225, 227, 228, 229, 230, 231, 232, 233, 234, 235, 236, 239, 240, 242, 243, 244, 245, 246, 247, 248, 249, 250, 251, 252, 253, 254, 255, 256, 257, 258, 261, 262, 263, 264, 265, 266, 267, 268, 269, 270, 272, 273, 274, 275, 276, 278, 279, 280, 281, 282, 283, 284, 285, 286, 287, 289, 291, 293, 294, 296, 298, 301, 302, 303, 304, 305, 306, 307, 308, 309, 310, 311, 312, 314, 315, 317, 318, 319, 321, 322, 323, 324, 326, 329, 331, 332, 333, 334, 335, 336, 348, 385, 387, 389, 392, 393, 394, 395, 406, 436, 438, 439, 441, 445, 457, 460, 496, 504, 507, 509, 511, 514, and 534;
(ii) a mutant sequence of any one nucleotide sequence shown in (i), where the mutant sequence has a mutant nucleotide at one or more positions of any corresponding nucleotide sequence shown in (i), and the mutant sequence has an activity of initiating translation of a circular nucleic acid molecule;
(iii) a nucleotide sequence that can be reversely complementary to a hybridized sequence of the nucleotide sequence shown in (i) or (ii) under a highly stringent hybridization condition or a very highly stringent hybridization condition and that has an activity of initiating translation of a circular nucleic acid molecule; and
(iv) a nucleotide sequence having at least 70%, optionally at least 80%, preferably at least 90%, more preferably at least 95%, most preferably at least 98% sequence identity with the nucleotide sequence shown in any one of (i) or (ii) and having an activity of initiating translation of a circular nucleic acid molecule.

[0022] Preferably, the polynucleotide includes a nucleotide sequence shown in any of the following sequences:

in some embodiments, according to the polynucleotide in the disclosure, the polynucleotide is a polynucleotide including the IRES that is screened by the method according to any one of claims 1 to 9.

[0023] In some embodiments, provided is use of the polynucleotide according to the disclosure in at least one of (a₁)-(a₂):

(a₁) initiating translation of a circular nucleic acid molecule, or preparing a product for initiating translation of a circular nucleic acid molecule; and
(a₂) increasing a protein expression level of a circular nucleic acid molecule, or preparing a product for increasing a protein expression level of a circular nucleic acid molecule.

[0024] According to a third aspect, the disclosure provides a circular nucleic acid molecule, where the circular nucleic acid molecule includes the polynucleotide according to the second aspect;

preferably, the circular nucleic acid molecule further includes a coding region encoding a polypeptide of interest, and the coding region is operably linked to the polynucleotide; and
optionally, the circular nucleic acid molecule further includes one or more of the following elements: a 5′ spacer region, a 3′ spacer region, a second exon, and a first exon.

[0025] In some embodiments, according to the circular nucleic acid molecule provided by the disclosure, the 5′ spacer region includes a sequence shown in any one of (b₁)-(b₂):

(b₁) a nucleotide sequence shown in any one of SEQ ID NOs: 549-550; and
(b₂) a sequence having at least 90%, optionally at least 95%, preferably at least 97%, more preferably at least 98%, most preferably at least 99% sequence identity with the nucleotide sequence shown in (b₁).

[0026] In some embodiments, according to the circular nucleic acid molecule provided by the disclosure, the 3′ spacer region includes a sequence shown in any one of (c₁)-(c₂):

(c₁) a nucleotide sequence shown in any one of SEQ ID NOs: 551-553; and
(c₂) a sequence having at least 90%, optionally at least 95%, preferably at least 97%, more preferably at least 98%, most preferably at least 99% sequence identity with the nucleotide sequence shown in (c₁).

[0027] In some embodiments, according to the circular nucleic acid molecule provided by the disclosure, the second exon includes a sequence shown in any one of (d₁)-(d₂):

(d₁) a nucleotide sequence shown in SEQ ID NO: 555; and
(d₂) a sequence having at least 90%, optionally at least 95%, preferably at least 97%, more preferably at least 98%, most preferably at least 99% sequence identity with the nucleotide sequence shown in (d₁).

[0028] In some embodiments, according to the circular nucleic acid molecule provided by the disclosure, the first exon includes a sequence shown in any one of (e₁)-(e₂):

(e₁) a nucleotide sequence shown in SEQ ID NO: 554; and
(e₂) a sequence having at least 90%, optionally at least 95%, preferably at least 97%, more preferably at least 98%, most preferably at least 99% sequence identity with the nucleotide sequence shown in (e₁).

[0029] According to a fourth aspect, the disclosure provides a cyclization precursor nucleic acid molecule, where the cyclization precursor nucleic acid molecule is cyclized to form the circular nucleic acid molecule according to the third aspect; and

optionally, the cyclization precursor nucleic acid molecule further includes one or more of the following elements:
a 5′ homology arm, a 3′ intron, a second exon, a 5′ spacer region, a coding region, a 3′ spacer region, a first exon, a 5′ intron and a 3′ homology arm.

[0030] In some embodiments, according to the cyclization precursor nucleic acid molecule provided by the disclosure, the 5′ homology arm includes a sequence shown in any one of (g₁)-(g₂):

(g₁) a nucleotide sequence shown in any one of SEQ ID NOs: 558-559; and
(g₂) a sequence having at least 90%, optionally at least 95%, preferably at least 97%, more preferably at least 98%, most preferably at least 99% sequence identity with the nucleotide sequence shown in (g₁).

[0031] In some embodiments, according to the cyclization precursor nucleic acid molecule provided by the disclosure, the 3′ homology arm includes a sequence shown in any one of (h₁)-(h₂):

(h₁) a nucleotide sequence shown in any one of SEQ ID NOs: 560-561; and
(h₂) a sequence having at least 90%, optionally at least 95%, preferably at least 97%, more preferably at least 98%, most preferably at least 99% sequence identity with the nucleotide sequence shown in (h₁).

[0032] In some embodiments, according to the cyclization precursor nucleic acid molecule provided by the disclosure, the 5′ intron includes a sequence shown in any one of (j₁)-(j₂):

(j₁) a nucleotide sequence shown in SEQ ID NO: 556; and
(j₂) a sequence having at least 90%, optionally at least 95%, preferably at least 97%, more preferably at least 98%, most preferably at least 99% sequence identity with the nucleotide sequence shown in (j₁).

[0033] In some embodiments, according to the cyclization precursor nucleic acid molecule provided by the disclosure, the 3′ intron includes a sequence shown in any one of (k₁)-(k₂):

(k₁) a nucleotide sequence shown in SEQ ID NO: 557; and
(k₂) a sequence having at least 90%, optionally at least 95%, preferably at least 97%, more preferably at least 98%, most preferably at least 99% sequence identity with the nucleotide sequence shown in (k₁).

[0034] According to a fifth aspect, the disclosure provides a recombinant nucleic acid molecule, where the recombinant nucleic acid molecule is selected from any one of (f₁)-(f₂):

(f₁) including the polynucleotide according to the second aspect; and
(f₂) transcription to form the cyclization precursor nucleic acid molecule according to the fourth aspect.

[0035] According to a sixth aspect, the disclosure provides a recombinant expression vector, where the recombinant expression vector includes the recombinant nucleic acid molecule according to the fifth aspect.

[0036] According to a seventh aspect, the disclosure provides a recombinant host cell, where the recombinant host cell includes the polynucleotide according to the second aspect, the circular nucleic acid molecule according to the third aspect, the cyclization precursor nucleic acid molecule according to the fourth aspect, the recombinant nucleic acid molecule according to the fifth aspect, or the recombinant expression vector according to the sixth aspect.

[0037] According to an eighth aspect, the disclosure provides a method for preparing a circular nucleic acid molecule with an improved protein expression level, where the method includes a step of operably linking the polynucleotide according to the second aspect to a coding region of the circular nucleic acid molecule.

[0038] According to a ninth aspect, the disclosure provides use of the circular nucleic acid molecule according to the third aspect, the cyclization precursor nucleic acid molecule according to the fourth aspect, the recombinant nucleic acid molecule according to the fifth aspect, or the recombinant expression vector according to the sixth aspect in at least one of (g₁) to (g₃):

(g₁) expressing a protein, or preparing a product for expressing a protein;
(g₂) expressing a polypeptide, or preparing a product for expressing a polypeptide; and
(g₃) serving as or preparing a nucleic acid vaccine;
optionally, the protein or the polypeptide is one or more selected from: an antigen, an antibody, an antigen-binding fragment, a channel protein, a receptor, a cytokine, and an immune checkpoint inhibitor.

### Effects of the Present Invention

[0039] In some embodiments, through the Levenshtein distance-based IRES screening method provided by the disclosure, whether there is the IRES in the to-be-predicted sequence can be efficiently and accurately determined. If there is the IRES in the to-be-predicted sequence, a position of the IRES can also be further predicted and determined by further predicting the secondary structure of the to-be-predicted sequence in combination with the longest common substring of the to-be-predicted sequence and the sample sequence, so as to screen out a possible IRES core sequence from the sequences, which provides a technical support for screening of highly active IRESs, facilitates discovery of a new IRES sequence, and helps a researcher to selectively perform experimental verification on a RNA sequence with a higher probability of the presence of an IRES sequence, thereby improving the efficiency of experimental verification and saving ineffective time and costs.

[0040] In some embodiments, the polynucleotide shown in any sequence of SEQ ID NOs: 1 to 548 is screened by the method provided by the disclosure. In the disclosure, through experimental verification, it is found that the polynucleotide shown in any sequence of SEQ ID NOs: 1 to 548 has the activity of initiating translation of the circular nucleic acid molecule, which indicates that the screening method provided in the disclosure has an advantage of high accuracy.

[0041] In some embodiments, in the disclosure, through comparison, it is found that the polynucleotide including any nucleotide sequence shown in (i) is screened according to the method of the present disclosure, the IRES activity of the polynucleotide exceeds that of a CVB3 IRES element with high translation initiation activity that has been found so far, which can significantly increase the protein expression level of the circular nucleic acid molecule, thereby providing abundant translation initiation elements for application of the circular nucleic acid molecule in preparing a protein, serving as a vaccine, producing a therapeutic protein, or serving as a means of gene therapy, etc.

[0042] In some embodiments, the disclosure provides the circular nucleic acid molecule, including the polynucleotide that includes the nucleotide sequence shown in (i), which can achieve a high expression level of a polypeptide of interest and a protein of interest, thereby further expanding the application of the circular nucleic acid molecule in the fields of protein production, prevention or treatment of clinical diseases, etc.

[0043] In some embodiments, in the disclosure, the polynucleotide shown in any sequence in (i) is operably linked to the coding region of the circular nucleic acid molecule, providing a good basis for efficient expression of the protein of interest by the circular nucleic acid molecule.

### BRIEF DESCRIPTION OF THE DRAWINGS

[0044] FIG. 1 shows a diagram of agarose gel electrophoresis of some linear mRNA molecules and circular mRNA molecules prepared in Example 2, where bands indicated by linear IRESs 1 to 30 in the figure sequentially represent electrophoresis bands of the linear mRNA molecules including polynucleotide sequences shown in SEQ ID NOs: 1 to 30, and bands indicated by circle IRESs 1 to 30 in the figure sequentially represent electrophoresis bands of the circular mRNA molecules including polynucleotide sequences shown in SEQ ID NOs: 1 to 30;

[0045] FIG. 2 shows a diagram of agarose gel electrophoresis of some linear mRNA molecules and circular mRNA molecules prepared in Example 2, where bands indicated by linear IRESs 31 to 62 in the figure sequentially represent electrophoresis bands of the linear mRNA molecules including polynucleotide sequences shown in SEQ ID NOs: 31 to 62, and bands indicated by circle IRESs 31 to 62 in the figure sequentially represent electrophoresis bands of the circular mRNA molecules including polynucleotide sequences shown in SEQ ID NOs: 31 to 62;

[0046] FIG. 3 shows a diagram of agarose gel electrophoresis of some linear mRNA molecules and circular mRNA molecules prepared in Example 2, where bands indicated by linear IRESs 63 to 94 in the figure sequentially represent electrophoresis bands of the linear mRNA molecules including polynucleotide sequences shown in SEQ ID NOs: 63 to 94, and bands indicated by circle IRESs 63 to 94 in the figure sequentially represent electrophoresis bands of the circular mRNA molecules including polynucleotide sequences shown in SEQ ID NOs: 63 to 94;

[0047] FIG. 4 shows a test result of a fluorescent protein expressed by a circular mRNA molecule constructed by using a polynucleotide obtained by the IRES screening method in the disclosure, where a bar graph in the figure shows a control 1, a control 2, and circular mRNA molecules including nucleotide sequences shown in SEQ ID NOs: 1, 2, 3, 4, 9, 10, 11, 13, 14, 15, 17, 18, 19, 20, 25, 26, 27, 28, 41, 42, 45, 46, 51, 56, 59, 72, 79, and 91 from left to right;

[0048] FIG. 5 shows a test result of a fluorescent protein expressed by a circular mRNA molecule constructed by using a polynucleotide obtained by the IRES screening method in the disclosure, where a bar graph in the figure shows a control 1, a control 2, and circular mRNA molecules including nucleotide sequences shown in SEQ ID NOs: 98, 101, 104, 106, 107, 110, 115, 116, 117, 118, 119, 122, 123, 125, 127, 129, 130, 135, 139, 165, 179, 180, 183, 186, 188, 198, 200, and 215 from left to right;

[0049] FIG. 6 shows a test result of a fluorescent protein expressed by a circular mRNA molecule constructed by using a polynucleotide obtained by the IRES screening method in the disclosure, where a bar graph in the figure shows a control 1, a control 2, and circular mRNA molecules including nucleotide sequences shown in SEQ ID NOs: 216, 217, 218, 219, 220, 221, 222, 223, 225, 227, 228, 229, 230, 231, 232, 233, 234, 235, 236, 239, 240, 242, 243, 244, 245, 246, 247, and 248 from left to right;

[0050] FIG. 7 shows a test result of a fluorescent protein expressed by a circular mRNA molecule constructed by using a polynucleotide obtained by the IRES screening method in the disclosure, where a bar graph in the figure shows a control 1, a control 2, and circular mRNA molecules including nucleotide sequences shown in SEQ ID NOs: 249, 250, 251, 252, 253, 254, 255, 256, 257, 258, 261, 262, 263, 264, 265, 266, 267, 268, 269, 270, 272, 273, 274, 275, 276, 278, 279, and 280 from left to right;

[0051] FIG. 8 shows a test result of a fluorescent protein expressed by a circular mRNA molecule constructed by using a polynucleotide obtained by the IRES screening method in the disclosure, where a bar graph in the figure shows a control 1, a control 2, and circular mRNA molecules including nucleotide sequences shown in SEQ ID NOs: 281, 282, 283, 284, 285, 286, 287, 289, 291, 293, 294, 296, 298, 301, 302, 303, 304, 305, 306, 307, 308, 309, 310, 311, 312, 314, 315, and 317 from left to right;

[0052] FIG. 9 shows a test result of a fluorescent protein expressed by a circular mRNA molecule constructed by using a polynucleotide obtained by the IRES screening method in the disclosure, where a bar graph in the figure shows a control 1, a control 2, and circular mRNA molecules including nucleotide sequences shown in SEQ ID NOs: 318, 319, 321, 322, 323, 324, 326, 329, 331, 332, 333, 334, 335, 336, 348, 385, 387, 389, 392, 393, 394, 395, 406, 436, 438, 439, 441, 445, 457, 460, 496, 504, 507, 509, 511, 514, and 534 from left to right;

[0053] FIG. 10 shows a diagram of a secondary structure of a human poliovirus 1 strain Mahoney_CDC 5′UTR sequence predicted in the disclosure and a position of an IRES; and

[0054] FIG. 11 shows a diagram of test results of luciferase protein expression in a human poliovirus 1 strain Mahoney_CDC 5′UTR group, a human echovirus 29 strain JV-10 group and a human coxsackievirus B3 group.

### DETAILED DESCRIPTION

### Definitions

[0055] When used in combination with the term “include” in the claims and/or description, the word “a” or “an” may refer to “one”, but may also refer to “one or more”, “at least one” and “one or more than one”.

[0056] As used in the claims and description, the word “include”, “have”, “comprise” or “contain” is meant to be inclusive or open-ended without exclusion of additional unrecited elements or method steps.

[0057] Throughout this application document, the term “about” means that one value includes a standard deviation of an error of a device or method used for measuring the value.

[0058] Although the disclosed content supports a definition of the term “or” only as a substitute and “and/or”, the term “or” in the claims refers to “and/or” unless it is explicitly stated that it is only the substitute or substitutes are mutually exclusive.

[0059] The term “one-hot encoding”, also known as one-bit valid encoding, mainly means encoding N states by using an N-bit state register, where each state has its own register bit, and only one bit is valid at any time. The one-hot encoding is a representation of a categorical variable as a binary vector. First, a categorical value needs to be mapped to an integer value. Then, each integer value is expressed as a binary vector, which is zero-valued except for an index of an integer, which is denoted as 1.

[0060] A term “sample sequence traversing” indicates that sample sequences are objects (or elements) arranged into a column, and each element is either before or after other elements. A sequence between elements is very important. The sample sequence traversing means accessing each element in a sample sequence sequentially along a certain search route once and only once. An operation for accessing the element depends on a specific application problem. Sequence traversing is often used for tree search and graph search of a data structure.

[0061] The term “Levenshtein distance” is a measure of a distance between two string sequences. Formally speaking, a Levenshtein distance of two strings is the minimum number of single character editing (for example, deleting, inserting, and substituting) required to transform one string into another string. The Levenshtein distance is also known as an edit distance. Although the Levenshtein distance is only a type of edit distance, the Levenshtein distance is closely related to pairwise string alignment. In mathematics, the Levenshtein distance between two strings a and b satisfy that levab(i, j)=max(i, j), where if min(i, j)=0, levab(i, j)=min(levab(i−1, j)+1, levab(i, j−1)+1, and levab(i−1, j−1)+1) (ai !=bj), where ai !=bj is an indicator function. When ai !=bj, a value is 1, otherwise, a value is 0. It should be noted that in the minimum item, a first part corresponds to a deletion operation (from a to b), a second part corresponds to an insertion operation, and a third part corresponds to a substitution operation.

[0062] The term “maximum common substring” is to find a longest substring of two or more known strings. A difference between a longest common substring and a longest common subsequence is that the subsequences do not have to be continuous, but the substrings must be continuous.

[0063] The terms “polypeptide,” “peptide,” and “protein” are used interchangeably herein and are amino acid polymers of any length. The polymer can be linear or branched, can contain modified amino acids, and can be interrupted by non-amino acids. The term also includes amino acid polymers that have been subjected to modification (for example, disulfide bond formation, glycosylation, lipidation, acetylation, phosphorylation, or any other treatment, such as conjugation with a labeling component).

[0064] The term “polynucleotide” or “nucleic acid molecule” refers to a polymer consisting of nucleotides. The polynucleotide may be in a form of an individual fragment or a component of a larger nucleotide sequence structure, derived from nucleotide sequences that have been isolated at least once in quantity or concentration, and sequences and their component nucleotide sequences can be identified, manipulated, and recovered by a standard molecular biological method (for example, by using a cloning vector). When one nucleotide sequence is expressed by one DNA sequence (namely, A, T, G, C), this also indicates inclusion of one RNA sequence (namely, A, U, G, C) where “U” substitutes for “T”. In other words, “polynucleotide” refers to a nucleotide polymer removed from other nucleotides (the individual fragment or entire fragment), or may be a component or constituent of the larger nucleotide structure, such as an expression vector or a polycistronic sequence. The polynucleotides include DNA, RNA and cDNA sequences.

[0065] The term “circular nucleic acid molecule” refers to a nucleic acid molecule in a closed ring. In some specific embodiments, the circular nucleic acid molecule is a circular RNA molecule. More specifically, the circular nucleic acid molecule is a circular mRNA molecule.

[0066] In some embodiments, the circular RNA molecule in the disclosure is formed by linking a 5′ end of the upstream of a linear RNA molecule to a 3′ end of the downstream of the linear RNA molecule to form a circular form. The circular RNA molecule in the disclosure is formed by subjecting a cyclization precursor RNA molecule to cleavage and a cyclization reaction to form a circular form.

[0067] The term “linear RNA” refers to an RNA precursor that can be cyclized to form circular RNA, which is usually transcribed from a linear DNA molecule.

[0068] The term “linear RNA” refers to RNA with a translation function including a 5′ cap structure, a 3′ polyadenosine tail (PolyA tail), a 5′ untranslational region (5′ UTR), a 3′ untranslational region (3′ UTR), an open reading frame (ORF), and the like.

[0069] The term “translation initiation element” refers to any sequence element capable of recruiting ribosomes and initiating a translation process of an RNA molecule. For example, the translation initiation element is an IRES element, an m⁶A modified sequence, a rolling circle translation initiation sequence, or the like.

[0070] The term “IRES” is also known as an internal ribosome entry site, and the “internal ribosome entry site” (IRES) belongs to a translation control sequence, is usually located at a 5′ end of a gene of interest, and enables translation of RNA in a cap-independent manner. A transcribed IRES can be directly bound to a ribosomal subunit, so that an mRNA initiation codon is properly oriented in the ribosome for translation. The IRES sequence is usually located in the 5′UTR (just upstream of the initiation codon) of the mRNA. The IRES functionally replaces a requirement for various protein factors that interact with a translation mechanism of eukaryotes.

[0071] The term “coding region” refers to a gene sequence capable of transcribing a messenger RNA and finally translating the messenger RNA into a polypeptide or protein of interest.

[0072] The term “expression” includes any step involved in production of a polypeptide, which includes, but is not limited to, transcription, post-transcriptional modification, translation, post-translational modification, and secretion.

[0073] The terms “sequence identity” and “percent identity” refer to a percentage of same (that is, identical) nucleotides or amino acids of two or more polynucleotides or polypeptides. Sequence identity of two or more polynucleotides or polypeptides can be measured by the following method: aligning nucleotide or amino acid sequences of the polynucleotides or polypeptides, scoring the number of positions containing same nucleotide or amino acid residues in the aligned polynucleotides or polypeptides, and comparing the number of positions containing same nucleotide or amino acid residues in the aligned polynucleotides or polypeptides with the number of positions containing different nucleotide or amino acid residues in the aligned polynucleotides or polypeptides. Polynucleotides can differ at one position, for example, by inclusion of different nucleotides (that is, substitution or mutation) or deletion of nucleotides (that is, insertion of a nucleotide in one or two polynucleotides or deletion of nucleotides). Polypeptides can differ at one position, for example, by inclusion of different amino acids (that is, substitution or mutation) or deletion of amino acids (that is, insertion of an amino acid in one or two polypeptides or deletion of amino acids). The sequence identity can be calculated by dividing the number of the positions containing same nucleotide or amino acid residues by a total number of nucleotide or amino acid residues in the polynucleotides or polypeptides. For example, the percent identity can be calculated by dividing the number of the positions containing same nucleotide or amino acid residues by a total number of nucleotide or amino acid residues in the polynucleotides or polypeptides, and multiplying by 100.

[0074] For example, when compared and aligned with maximum correspondence by using a sequence comparison algorithm or measuring via visual inspection, two or more sequences or subsequences have at least 80%, 81%, 82%, 83%, 84%, 85%, 86%, 87%, 88%, 89%, 90%, 91%, 92%, 93%, 94%, 95%, 96%, 97%, 98% or 99% “sequence identity” or “percent identity” of nucleotides. In some embodiments, overall lengths of sequences in any one or two compared biopolymers (for example, polynucleotides) are substantially identical.

[0075] The term “recombinant nucleic acid molecule” refers to a polynucleotide having sequences which are not linked together in nature. A recombinant polynucleotide can be included in a proper vector, and the vector can be used for transformation into a proper host cell. The polynucleotide is then expressed in a recombinant host cell to produce, for example, a “recombinant polypeptide”, a “recombinant protein”, a “fusion protein”, and the like.

[0076] The term “recombinant expression vector” refers to a DNA structure for expressing, for example, a polynucleotide encoding a required polypeptide. The recombinant expression vector may include: for example, (i) a set of genetic elements having a regulatory effect on gene expression, such as a promoter and an enhancer; (ii) a structure or coding sequence capable of being transcribed into mRNA and translated into protein; and (iii) appropriate transcriptional subunits of transcription and translation initiation and termination sequences. The recombinant expression vector is constructed in any appropriate method. A nature of the vector is not critical and any vector including a plasmid, a virus, a phage, and a transposon can be used. Possible vectors used in the disclosure include, but are not limited to, chromosomal, non-chromosomal, and synthetic DNA sequences, such as a viral plasmid, a bacterial plasmid, a phage DNA, a yeast plasmid, and a vector derived from a combination of plasmid and phage DNA, such as DNAs from viruses such as lentivirus, retrovirus, vaccinia, adenovirus, fowlpox, baculovirus, SV40, and pseudorabies.

[0077] The term “host cell” refers to a cell into which an exogenous polynucleotide has been introduced, and includes a progeny of such cell. Host cells include “transformants” and “transformed cells,” namely, primary transformed cells and progenies derived therefrom. The host cell is any type of cellular system that can be used to produce an antibody molecule in the present invention, including a eukaryotic cell such as a mammalian cell, an insect cell, and a yeast cell; and a prokaryotic cell such as an Escherichia coli cell. The host cells include cultured cells, and also include cells within transgenic animals, transgenic plants, or cultured plant or animal tissue. The term “recombinant host cell” includes a host cell that differs from a parental cell after introduction of a circular nucleic acid molecule, a cyclization precursor nucleic acid molecule, a recombinant nucleic acid molecule or a recombinant expression vector, and the recombinant host cell is obtained specifically via transformation. The host cell in the disclosure may be a prokaryotic cell or a eukaryotic cell, as long as the host cell is a cell into which the circular nucleic acid molecule, the cyclization precursor nucleic acid molecule, the recombinant nucleic acid molecule, or the recombinant expression vector in the disclosure can be introduced.

[0078] The term “highly stringent condition” means subjecting probes of at least 100 nucleotides in length to prehybridization and hybridization treatments for 12 to 24 hours at 42° C. in 5×SSPE (saline sodium phosphate EDTA), 0.3% SDS, 200 μg/mL sheared and denatured salmon sperm DNA and 50% formamide according to a standard Southern blotting procedure for the DNA, and finally washing a carrier material with 2×SSC and 0.2% SDS at 65° C. for three times, each washing being carried out for 15 minutes.

[0079] As used in the disclosure, the term “very highly stringent condition” means subjecting probes of at least 100 nucleotides in length to prehybridization and hybridization for 12 to 24 hours at 42° C. in 5×SSPE (saline sodium phosphate EDTA), 0.3% SDS, 200 μg/mL sheared and denatured salmon sperm DNA and 50% formamide according to a standard Southern blotting procedure for the DNA, and finally washing a carrier material with 2×SSC and 0.2% SDS at 70° C. for three times, each washing being carried out for 15 minutes.

[0080] Unless otherwise defined or clearly indicated in this context, all technical and scientific terms in the disclosure have the same meaning as commonly understood by a person of ordinary skill in the art to which the disclosure belongs.

### Technical Solution

[0081] In the technical solution in the disclosure, numbers in nucleotide and amino acid sequence listings in the description represent the following meanings:

[0082] Sequences shown in SEQ ID Nos: 1 to 548, and 562 to 564 are polynucleotide sequences having an activity of initiating translation of circular nucleic acid molecules;

[0083] A sequence shown in a SEQ ID NO: 549 is a nucleotide sequence of a 5′ spacer sequence 1;

[0084] A sequence shown in SEQ ID NO: 550 is a nucleotide sequence of a 5′ spacer sequence 2;

[0085] A sequence shown in SEQ ID NO: 551 is a nucleotide sequence of a 3′ spacer sequence 1;

[0086] A sequence shown in SEQ ID NO: 552 is a nucleotide sequence of a 3′ spacer sequence 2;

[0087] A sequence shown in SEQ ID NO: 553 is a nucleotide sequence of a 3′ spacer sequence 3;

[0088] A sequence shown in SEQ ID NO: 554 is a nucleotide sequence of an exon element 1 (E1) of a class I PIE system;

[0089] A sequence shown in SEQ ID NO: 555 is a nucleotide sequence of an exon element 2 (E2) of a class I PIE system;

[0090] A sequence shown in a SEQ ID NO: 556 is a nucleotide sequence of a 5′ intron of a class I PIE system;

[0091] A sequence shown in SEQ ID NO: 557 is a nucleotide sequence of a 3′ intron of a class I PIE system;

[0092] A sequence shown in SEQ ID NO: 558 is a nucleotide sequence of a 5′ homology arm sequence 1 (H1);

[0093] A sequence shown in SEQ ID NO: 559 is a nucleotide sequence of a 5′ homology arm sequence 2 (H2);

[0094] A sequence shown in SEQ ID NO: 560 is a nucleotide sequence of a 3′ homology arm sequence 1; and

[0095] A sequence shown in SEQ ID NO: 561 is a nucleotide sequence of a 3′ homology arm sequence 2.

### Levenshtein Distance-Based IRES Screening Method

[0096] The Levenshtein distance-based IRES screening method in the disclosure includes the following steps:

(1) selecting n sequences including an IRES as sample sequences, where n≥1 and n is a natural number;
(2) subjecting the sample sequences and to-be-predicted sequences to one-hot encoding respectively, where categorical variables are A, T, C, and G;
(3) traversing the sample sequences, and calculating a Levenshtein distance between each sample sequence and the to-be-predicted sequence;
(4) calculating an average of Levenshtein distances between all sample sequences and the to-be-predicted sequences; and
(5) determining, based on the average, whether the to-be-predicted sequences include the IRES.

[0097] According to the screening method provided by the disclosure, the Levenshtein distance is used for the first time to screen and determine IRESs for a large number of to-be-predicted sequence samples, which helps the researchers to selectively perform experimental verification on the to-be-predicted sequence samples with a high probability of the presence of the IRES, thereby effectively reducing time and costs for IRES sequence screening. Compared with an existing IRES prediction method, the screening method in the disclosure has advantages of accurate results and high efficiency.

[0098] In some embodiments, in the step (5), if the average is not less than a set prediction threshold, it is determined that the to-be-predicted sequence includes the IRES, otherwise it is determined that the to-be-predicted sequence includes no IRES.

[0099] In some specific embodiments, the prediction threshold is not less than 0.5. When the prediction threshold is not less than 0.5, there is a high probability that the to-be-predicted sequence includes the IRES. In some preferable embodiments, the prediction threshold is 0.75. When the prediction threshold is 0.75, the to-be-predicted sequences generally include the IRES.

[0100] In some specific embodiments, a Levenshtein distance calculation method is as follows: a Levenshtein distance between two strings a and b satisfy that levab(i, j)=max(i, j), where if min(i, j)=0, levab(i, j)=min(levab(i−1, j)+1, levab(i, j−1)+1, and levab(i−1, j−1)+1) (ai !=bj), where ai !=bj is an indicator function. When ai !=bj, a value is 1, otherwise, a value is 0. It should be noted that in the minimum item, a first part corresponds to a deletion operation (from a to b), a second part corresponds to an insertion operation, and a third part corresponds to a substitution operation.

[0101] In some embodiments, the method further includes the following steps: predicting a secondary structure of the to-be-predicted sequence determined to include the IRES, and determining a position of the IRES in the to-be-predicted sequence in combination with the longest common substring.

[0102] Further, predicting the secondary structure of the to-be-predicted sequence determined to include the IRES includes: predicting, by using at least one of RNAfold, Mfold, RNAfoldweerver, and Vienna RNA software, the secondary structure of the to-be-predicted sequence determined to include the IRES.

[0103] In combination with IRES analysis software such as RNAfold, the position of IRES in the to-be-predicted sequence containing IRES can be further analyzed and located, which facilitates the discovery of new IRES sequences.

[0104] In some embodiments, the method further includes the following step of: subjecting the to-be-predicted sequence determined to include the IRES to experimental verification to determine an IRES activity of the to-be-predicted sequence.

[0105] In some embodiments, the experimental verification includes the steps of:

constructing a circular nucleic acid molecule by using the to-be-predicted sequence determined to include the IRES, where in the circular nucleic acid molecule, the to-be-predicted sequence is operably linked to a nucleotide sequence encoding a fluorescent protein; and
obtaining a fluorescence signal released by the circular nucleic acid molecule, and determining the IRES activity of the to-be-predicted sequence based on the fluorescence signal.

[0106] In some specific embodiments, in the disclosure, by taking the condition that disclosed human poliovirus 1 strain Mahoney_CDC 5′ UTR (a sequence shown in SEQ ID NO: 564) with the IRES activity is used as a to-be-predicted sequence as an example, a process of determining, by the method in the disclosure, whether the sequence shown in SEQ ID NO: 564 contains the IRES is as follows:

(1) selection of a sample sequence: a highly active human Coxsackievirus B3 (CVB3) virus IRES sequence (SEQ ID NO: 562) and a highly active human Echovirus 29 strain JV-10 (E29) virus IRES sequence (SEQ ID NO: 563) that have been experimentally verified are selected as sample sequences;
(2) one-hot encoding: as shown in Tables 1-3 below, to-be-encoded objects are determined as the sample sequence and the to-be-predicted sequence, where the categorical variables are A, T, C, and G; and each sample has 4 features, and the features are converted into binary vectors for representation, thereby converting sequence letter information into digital information;

TABLE 1
(SEQ ID NO: 562)

| | T | T | A | A | A | A | C | A | G | . . . | T | A | C | A | G | C | A | A | A |
|---|---|---|---|---|---|---|---|---|---|---|---|---|---|---|---|---|---|---|---|
| A | 0 | 0 | 1 | 1 | 1 | 1 | 0 | 1 | 0 | . . . | 0 | 1 | 0 | 1 | 0 | 0 | 1 | 1 | 1 |
| T | 1 | 1 | 0 | 0 | 0 | 0 | 0 | 0 | 0 | . . . | 1 | 0 | 0 | 0 | 0 | 0 | 0 | 0 | 0 |
| C | 0 | 0 | 0 | 0 | 0 | 0 | 1 | 0 | 0 | . . . | 0 | 0 | 1 | 0 | 0 | 1 | 0 | 0 | 0 |
| G | 0 | 0 | 0 | 0 | 0 | 0 | 0 | 0 | 1 | . . . | 0 | 0 | 0 | 0 | 1 | 0 | 0 | 0 | 0 |

TABLE 2
(SEQ ID NO: 563)

| | T | T | A | A | A | A | C | A | G | . . . | C | A | C | C | G | C | A | A | A |
|---|---|---|---|---|---|---|---|---|---|---|---|---|---|---|---|---|---|---|---|
| A | 0 | 0 | 1 | 1 | 1 | 1 | 0 | 1 | 0 | . . . | 0 | 1 | 0 | 0 | 0 | 0 | 1 | 1 | 1 |
| T | 1 | 1 | 0 | 0 | 0 | 0 | 0 | 0 | 0 | . . . | 0 | 0 | 0 | 0 | 0 | 0 | 0 | 0 | 0 |
| C | 0 | 0 | 0 | 0 | 0 | 0 | 1 | 0 | 0 | . . . | 1 | 0 | 1 | 1 | 0 | 1 | 0 | 0 | 0 |
| G | 0 | 0 | 0 | 0 | 0 | 0 | 0 | 0 | 1 | . . . | 0 | 0 | 0 | 0 | 1 | 0 | 0 | 0 | 0 |

TABLE 3
(SEQ ID NO: 564)

| | T | T | A | A | A | A | C | A | G | . . . | T | G | T | A | T | C | A | T | A |
|---|---|---|---|---|---|---|---|---|---|---|---|---|---|---|---|---|---|---|---|
| A | 0 | 0 | 1 | 1 | 1 | 1 | 0 | 1 | 0 | . . . | 0 | 0 | 0 | 1 | 0 | 0 | 1 | 0 | 1 |
| T | 1 | 1 | 0 | 0 | 0 | 0 | 0 | 0 | 0 | . . . | 1 | 0 | 1 | 0 | 1 | 0 | 0 | 1 | 0 |
| C | 0 | 0 | 0 | 0 | 0 | 0 | 1 | 0 | 0 | . . . | 0 | 0 | 0 | 0 | 0 | 1 | 0 | 0 | 0 |
| G | 0 | 0 | 0 | 0 | 0 | 0 | 0 | 0 | 1 | . . . | 0 | 1 | 0 | 0 | 0 | 0 | 0 | 0 | 0 |

(3) the sample sequences are traversed, and a Levenshtein distance between each sample sequence and the to-be-predicted sequence is calculated: wherein a represents the sample sequence, b represents the to-be-predicted sequence, i and j respectively represent a row and a column in Tables 1-3, and based on a calculation formula of the Levenshtein distance, a Levenshtein distance between the human poliovirus 1 strain Mahoney_CDC 5′UTR sequence and the human Coxsackievirus B3 (CVB3) virus IRES sequence is calculated to be 0.79028, and a Levenshtein distance between the human poliovirus 1 strain Mahoney_CDC 5′UTR sequence and the human Echovirus 29 strain JV-10 (E29) virus IRES sequence is calculated to be 0.79380;
(4) a prediction threshold is set to be 0.75, and an average of Levenshtein distances between 2 sample sequences and the to-be-predicted sequence is calculated to be 0.79204, where the average is greater than the prediction threshold of 0.75, and therefore, the to-be-predicted sequence, human poliovirus 1 strain Mahoney_CDC 5′UTR sequence, can be determined as the IRES-containing sequence;
(5) the sample sequences are traversed, and the longest common substrings of each sample sequence and the to-be-predicted sequence are separately searched, where the longest common substring of the to-be-predicted sequence, the human poliovirus 1 strain Mahoney_CDC 5′UTR sequence, and the sample sequence, the human Coxsackievirus B3 (CVB3) virus IRES sequence, is GCGGAACCGACTACTTTGGGTGTCCGTGTTTC, and the longest common substring of the to-be-predicted sequence, the human poliovirus 1 strain Mahoney_CDC 5′UTR sequence, and the sample sequence, the human Echovirus 29 strain JV-10 (E29) virus IRES sequence, is TCCTCCGGCCCCTGAATGCGGCTAATCCCAAC; and
(6) a secondary structure of the human poliovirus 1 strain Mahoney_CDC 5′UTR sequence is predicted by using RNAfold software, where as shown in FIG. 10, in combination with the longest common substring, it can be predicted that an IRES structure in the human poliovirus 1 strain Mahoney_CDC 5′UTR sequence is within a region marked by an oval circle.

[0107] As shown in FIG. 11, luciferase protein expression results reveal that mRNA and protein expression of the human poliovirus 1 strain Mahoney_CDC 5′UTR group is significantly higher than that of the control groups, the human echovirus 29 strain JV-10 group and the human coxsackievirus B3 group. It can thus be seen that the to-be-predicted sequence, the human poliovirus 1 strain Mahoney_CDC 5′UTR sequence, that is determined to include the IRES by the Levenshtein distance-based IRES screening method provided by the disclosure does include the IRES through experimental verification, and can be applied to expression of the circular RNA, and the IRES activity of the human poliovirus 1 strain Mahoney_CDC 5′UTR sequence is significantly higher than that of the sample sequences, the human Coxsackievirus B3 (CVB3) virus IRES sequence and the human echovirus 29 strain JV-10 (E29) virus IRES sequence. Therefore, it is proved that the Levenshtein distance-based IRES prediction method provided by the present invention has high prediction accuracy, and can be used to efficiently and accurately predict whether there is the IRES in the to-be-predicted sequence, and the IRES screened by the IRES prediction method provided by the present invention has higher activity and can be applied to the expression of the circular RNA.

[0108] Further, by the foregoing method, 548 nucleotide sequences containing the IRES are found via screening in the disclosure, and during further experimental verification, in the disclosure, it is found that a nucleotide sequence shown in any one of SEQ ID NOs: 1 to 548 has the IRES activity and can initiate the expression of a protein of interest in the circular nucleic acid molecule, indicating that the screening method provided by the disclosure has the advantages of high accuracy and high efficiency.

[0109] It should be noted that CVB3 IRES is a currently discovered IRES element having high IRES activity and capable of initiating protein expression of the circular nucleic acid molecule to high extent (Wesselhoeft R A, Kowalski P S, Anderson D G. Engineering circular RNA for potent and stable translation in eukaryotic cells. Nat Commun. 2018 Jul. 6; 9(1): 2629. doi: 10.1038/s41467-018-05096-6). In some specific embodiments, in the disclosure, by using the currently discovered CVB3 IRES having high IRES activity as a control, it is found that the polynucleotides of sequences shown below (SEQ ID NOs: 1, 2, 3, 4, 9, 10, 11, 13, 14, 15, 17, 18, 19, 20, 25, 26, 27, 28, 41, 42, 45, 46, 51, 56, 59, 72, 79, 91, 98, 101, 104, 106, 107, 110, 115, 116, 117, 118, 119, 122, 123, 125, 127, 129, 130, 135, 139, 165, 179, 180, 183, 186, 188, 198, 200, 215, 216, 217, 218, 219, 220, 221, 222, 223, 225, 227, 228, 229, 230, 231, 232, 233, 234, 235, 236, 239, 240, 242, 243, 244, 245, 246, 247, 248, 249, 250, 251, 252, 253, 254, 255, 256, 257, 258, 261, 262, 263, 264, 265, 266, 267, 268, 269, 270, 272, 273, 274, 275, 276, 278, 279, 280, 281, 282, 283, 284, 285, 286, 287, 289, 291, 293, 294, 296, 298, 301, 302, 303, 304, 305, 306, 307, 308, 309, 310, 311, 312, 314, 315, 317, 318, 319, 321, 322, 323, 324, 326, 329, 331, 332, 333, 334, 335, 336, 348, 385, 387, 389, 392, 393, 394, 395, 406, 436, 438, 439, 441, 445, 457, 460, 496, 504, 507, 509, 511, 514, and 534) in the disclosure have a higher capability of initiating the protein expression of the circular mRNA molecule compared with CVB3 IRES, indicating that a large number of nucleotide sequences of interest having extremely high IRES activity can be screened by the method in the disclosure, which lays a foundation for improving the level of the protein of interest expressed by the circular nucleic acid molecule.

### Polynucleotide Having Activity of Initiating Translation of Circular Nucleic Acid Molecule

[0110] Currently, although IRES elements capable of initiating a protein translation process have been found in some species (such as viruses), homology of viral IRES sequences of different species is low, and currently there is a lack of definite standards for determining the IRES sequences. Therefore, further research and identification are needed for the IRES sequences having the activity of initiating translation of the circular nucleic acid molecules.

[0111] To resolve the foregoing problem, the disclosure provides polynucleotides derived from different types of viruses as follows:

[0112] Echovirus E1 (strain Farouk/ATCC VR-1038), Echovirus E2 (strain USA/2013-19511), Echovirus E3 (isolate JSev001), Echovirus E3 (strain 61246-70294), Echovirus E3 (strain 61247-622), Echovirus E3 (strain 61245-2710), Echovirus E3 (strain 63038-1131), Echovirus E3 (strain 63040-70881), Echovirus E3 (isolate HNWY-01), Echovirus E3 (isolate ECHO3_INMI1), Echovirus E3 (isolate Env_2016_Sep_E-3), Echovirus E3 (strain Sakhalin-11.293), Echovirus E3 (strain HAI/2016-23067A), Echovirus E3 (strain HAI/2016-23066), Echovirus E3 (strain HAI/2016-23065A), Echovirus E3 (strain HAI/2016-23061), Echovirus E3 (strain HAI/2016-23056), Echovirus E3 (strain HAI/2016-23051A), Echovirus E3 (strain HAI/2016-23050), Echovirus E3 (isolate 123-R2), Echovirus E3 (strain Sakhalin/10_DU145), Echovirus E3 (strain Sakhalin/10_RD), Echovirus E3 (isolate E3/TO/BR/018), Echovirus E4 (strain 2F5), Echovirus 4 (strain AUS250G), Echovirus E4 (strain Pesacek), Echovirus E5, Echovirus E6, Echovirus 9 (strain Barty), Echovirus 9 (strain Hill), Echovirus E11, Echovirus E12, Echovirus E13 (strain HAI/2017-23078B), Echovirus E13 (strain HAI/2016-23072), Echovirus E13 (strain HAI/2016-23073), Echovirus E13 (strain HAI/2016-23075), Echovirus E13 (strain HAI/2017-23082B), Echovirus E14 (strain RO-81-1-79), Echovirus E14 (isolate ETH_P19/E14_2016), Echovirus E14 (isolate NSW-V04-2012-ECHO14), Echovirus E14 (isolate E14/P843/2013/China), Echovirus E14 (isolate E14/P968/2013/China), Echovirus E15 (strain CH 96-51), Echovirus E16 (isolate ETH_P4/E16_2016), Echovirus E16 (isolate E16/P85/2013/China), Echovirus E16 (strain Harrington), Echovirus 17 (strain CHHE-29), Echovirus E18 (isolate PC06/JS/CHN/2019), Echovirus E18 (strain E18/JXY2-2/2019), Echovirus E18 (isolate QD9/SD/CHN/2019), Echovirus E18 (isolate LJ/0530/2019), Echovirus E18 (strain 12J3), Echovirus E18 (strain USA/2015/CA-RGDS-1049), Echovirus E18 (isolate E18-221/HeB/CHN/2015), Echovirus E18 (strain 12G5), Echovirus E18 (isolate E18-393/HeB/CHN/2015), Echovirus E18 (isolate E18-398/HeB/CHN/2015), Echovirus E18 (isolate E18-HeB15-54462/HeB/CHN/2015), Echovirus E18 (isolate E18-HeB15-54498/HeB/CHN/2015), Echovirus E18 (isolate ETH_P12/E18_2016), Echovirus E18 (isolate NSW-V13A-2008-ECHO18), Echovirus E18 (strain A83/YN/CHN/2016), Echovirus E18 (strain A86/YN/CHN/2016), Echovirus E18 (isolate Jena/ST9524/10), Echovirus E18 (isolate Jena/VI10227/10), Echovirus E18 (isolate Kor05-ECV18-054cn), Echovirus E19 (strain HAI/2016-23039B), Echovirus E19 (strain HAI/2016-23036D), Echovirus E19 (strain HAI/2016-23037D), Echovirus E19 (strain HAI/2016-23037E), Echovirus E19 (strain HAI/2016-23042B), Echovirus E19 (strain HAI/2016-23046B), Echovirus E19 (strain HAI/2016-23047), Echovirus E19 (strain HAI/2016-23054), Echovirus E19 (strain HAI/2016-23052), Echovirus E19 (strain HAI/2016-23053), Echovirus E19 (strain HAI/2016-23062D), Echovirus E19 (strain HAI/2016-23063B), Echovirus E19 (strain HAI/2016-23064B), Echovirus E19 (strain HAI/2016-23067B), Echovirus E19 (strain HAI/2016-23070B), Echovirus E19 (strain HAI/2017-23079), Echovirus E19 (strain HAI/2017-23081A), Echovirus E19 (isolate ETH_P3/E19_2016), Echovirus E19 (strain NGR_2014), Echovirus E19 (isolate PDV_BLR_IN), Echovirus E19 (strain Burke), Echovirus E19 (strain K/542/81), Echovirus E20 (isolate E20/TO/BR/016), Echovirus E20 (strain HAI/2016-23038B), Echovirus E20 (strain HAI/2016-23041B), Echovirus E20 (strain HAI/2016-23085B), Echovirus E20 (strain HAI/2016-23065C), Echovirus E20 (strain HAI/2016-23068B), Echovirus E20 (strain HAI/2016-23069), Echovirus E20 (strain HAI/2017-23080B), Echovirus E20 (strain HAI/2017-23081B), Echovirus E20 (HAI/2016-23077B), Echovirus E20 (strain HAI/2017-23083C), Echovirus E20 (strain KM-EV20-2010), Echovirus E20 (strain JV-1), Echovirus E21 (strain 553/YN/CHN/2013), Echovirus E21 (strain Farina), Echovirus E24 (strain VEN/2018-23086), Echovirus E24 (isolate PZ18G/JS/20120703), Echovirus E24 (strain DeCamp), Echovirus E25 (strain USA/2016-19521), Echovirus E25 (strain USA/2018-23126), Echovirus E25 (strain 10-4339-2), Echovirus E25 (strain USA/CA/RGDS-2017-1010), Echovirus E25 (isolate NSW-V07-2007-ECHO25), Echovirus E25 (isolate NSW-V08-2008-ECHO25), Echovirus E25 (isolate NSW-V09-2008-ECHO25), Echovirus E25 (isolate NSW-V58-2010-ECHO25), Echovirus E25 (strain 61241-70868), Echovirus E25 (strain E25/ZE-wly/Zhejiang/CHN/2005), Echovirus E25 (isolate Jena/AN1380/10), Echovirus E25 (strain XM0297), Echovirus E25 (strain E25/2010/CHN/BJ), Echovirus E25 (isolate E25SD2010CHN), Echovirus E25 (strain HN-2), Echovirus E25 (strain JV-4), Echovirus E26 (strain Coronel), Echovirus E27 (isolate ETH_P8/E27_2016), Echovirus E27 (strain Bacon), Echovirus E29 (strain HAI/2016-23048B), Echovirus E29 (strain JV-10), Echovirus E30 (isolate E30/TO/BR/032), Echovirus E30 (isolate TL12C/NM/CHN/2016), Echovirus E30 (isolate TL7C/NM/CHN/2016), Echovirus E30 (strain USA/2018-23125), Echovirus E30 (Echo30/Hokkaido.JPN/21208/2017), Echovirus E30 (strain USA/2015/CA-RGDS-1046), Echovirus E30 (strain USA/2017/CA-RGDS-1048), Echovirus E30 (isolate B001/USA/2016), Echovirus E30 (strain 16-110), Echovirus E30 (strain 1-B4-TW), Echovirus E30 (strain 2002-59), Echovirus E30 (strain KM/A363/09), Echovirus E30 (isolate 1-MRS2013), Echovirus E30 (isolate 3-MRS2013), Echovirus E30 (isolate 4-MRS2013), Echovirus E30 (isolate 2012EM161), Echovirus E30 (isolate E30SD2010CHN), Echovirus E30 (isolate ECV30/GX10/05), Echovirus E30 (strain Kor08-ECV30), Echovirus E30 (isolate FDJS03_84), Echovirus 30 (strain Bastianni), Echovirus 31 (strain Caldwell), Echovirus 32 (strain PR-10), Echovirus E33 (strain YNK35/CHN/2013), Echovirus E33 (strain YNA12/CHN/2013), Human poliovirus 1 (isolate CHN-Hainan/93-2), Human poliovirus 1 (isolate RUS39223), Human poliovirus 1 (isolate Pak-1), Human poliovirus 1 (isolate TJK35363 clone 6), Human poliovirus 1 (strain 3788ALB96), Human poliovirus 1 (isolate CHN15115/Xinjiang/CHN/2011), Human poliovirus 1 (isolate 29690_c1), Human poliovirus 1 (strain NIE1018316), Human poliovirus 1 (isolate EGY1218587), Human poliovirus 1 (isolate 558/BRA-PE/88), Human poliovirus 2 (isolate Env2008_E2450), Human poliovirus 2 (strain CHA1218985), Human poliovirus 2 (isolate Env2008_E3218), Human poliovirus 2 (strain MAD-2593-11), Human poliovirus 3 (strain PAK1019536), Human poliovirus 3 (isolate Env08_E2886), Human poliovirus 3 (strain SWI10947), Human poliovirus 3 (strain FIN84-2493), Human poliovirus 3 (strain USOL-D-bac), Enterovirus A71 (isolate 2019-EV-A71-R398), Enterovirus A71 (strain USA/2018-23296), Enterovirus A71 (strain 16L), Enterovirus A76 (strain 10-3291-2), Human enterovirus A76 (AY697458), Enterovirus A89 (strain KSYPH-TRMH22F/XJ/CHN/2011), Human enterovirus A89 (AY697459.1), Enterovirus A90 (strain 10-2879-1), Enterovirus A90 (isolate SCHO5F/XJ/CHN/2011), Human enterovirus A90 (isolate 01336/SD/CHN/EV90), Human enterovirus A90 (AB192877.1), Human enterovirus A90 (isolate F950027), Human enterovirus 91 (AY697461.1), Human enterovirus A92 (strain RJG7), Simian enterovirus SV19 (strain NOLA-2), Simian enterovirus SV19 (isolate cg4006), Simian enterovirus SV19 (strain M19s (P2)), Simian enterovirus SV43 (strain OM112t (P12)), Simian enterovirus SV46 (isolate cg5400), Simian enterovirus SV46 (strain RNM5), Enterovirus B69 (strain Toluca-1), Enterovirus B69 (isolate 15_491), Enterovirus B73 (isolate 088/SD/CHN/04), Human enterovirus B73 (isolate 2776-82), Human enterovirus 74 (strain Rikaze-136/XZ/CHN/2010), Enterovirus B75 (isolate Y16/XZ/CHN/2007), Enterovirus B75 (isolate 102/SD/CHN/97), Enterovirus B75 (strain USA/OK85-10362), Human enterovirus B77 (strain USA/TX97-10394), Human enterovirus B77 (strain CF496-99), Human enterovirus B79 (strain 17-2255-1_E79), Human enterovirus B79 (AB426610.1), Human enterovirus B79 (strain USA/CA79-10384), Enterovirus B80 (isolate HT-LYKH2O3F/XJ/CHN/2011), Human enterovirus B80 (isolate HZ01/SD/CHN/2004), Enterovirus B81 (isolate 99279/XZ/CHN/1999), Human enterovirus B81 (strain USA/CA68-10389), Human enterovirus B82 (strain USA/CA64-10390), Human enterovirus B83 (strain USA/CA76-10392), Enterovirus B83 (isolate 99245/XZ/CHN/1999), Enterovirus B83 (isolate AFP341-GD-CHN-2001), Enterovirus B83 (isolate 246/YN/CHN/08), Enterovirus B84 (strain GHA:BAR:TES/2017), Enterovirus B84 (isolate AFP452/GD/CHN/2004), Human enterovirus B84 (isolate CIV2003-10603), Human enterovirus B85 (strain HTPS-MKLH04F/XJ/CHN/2011), Human enterovirus B85 (strain BAN00-10353), Human enterovirus B86 (strain BAN00-10354), Enterovirus B87 (isolate LY02/SD/CHN/2000), Enterovirus B88 (strain 11-4644-1), Human enterovirus B88 (strain BAN01-10398), Enterovirus B93 (isolate 99052/XZ/CHN/1999), Enterovirus B93 (isolate 38-03), Human enterovirus B97 (strain 99188/SD/CHN/1999/EV97), Human enterovirus B97 (strain DT94-0227), Human enterovirus B97 (strain BAN99-10355), Human enterovirus B98 (strain: T92-1499), Human enterovirus B100 (isolate BAN2000-10500), Human enterovirus B101 (strain CIV03-10361), Enterovirus B106 (isolate AKS-AWT-AFP2F/XJ/CHN/2011), Human enterovirus 106 (isolate 148/YN/CHN/12), Enterovirus C96 (strain VEN/2018-23123A), Enterovirus C96 (isolate 127/SD/CHN/1991), Enterovirus C96 (clone V13C), Enterovirus C99 (strain 10L1), Human enterovirus C104 (isolate kvv585-16-TS), Human enterovirus C105 (strain USA/OK/2014-19362), Human enterovirus C116 (strain 126), Enterovirus C117 (strain JX-C117-40-2017), Human enterovirus C118 (isolate CQ5185), Human enterovirus D68 (strain Fermon), Enterovirus D68 (TBp-13-Ph209), Enterovirus D70 (strain JPN/1989-23292), Enterovirus D94 (strain ANG/2010-23293), Human enterovirus D94 (isolate 19/04), Enterovirus D111 (strain ANG/2010-23294), Enterovirus D111 (isolate D111-NGR-KAT-1263), Simian enterovirus J103 (isolate cg8227), Coxsackievirus A2 (isolate HN202009), Coxsackievirus A2 (isolate 16027), Coxsackievirus A2 (isolate CVA2-1388-M14/XY/CHN/2017), Coxsackievirus A2 (isolate CVA2/Shenzhen50/CHN/2012), Coxsackievirus A2 (strain 2260165), Coxsackievirus A4 (strain CA4/JX2204/2014), Coxsackievirus A4 (isolate HK458564/2016), Coxsackievirus A5 (isolate CV-A5-3487-M14-XY-CHN-2017), Coxsackievirus A5 (strain CVA5/13164/HUN/2015), Coxsackievirus A6 (isolate DN1501), Coxsackievirus A6 (strain RYN-A1205), Coxsackievirus A7 (strain MAD-3101-11), Coxsackievirus A8 (isolate 13-467/GS/CHN/2013), Coxsackievirus A8 (isolate C177/CHW/AUS/2017), Coxsackievirus A8 (isolate CV-A8/P82/2013/China), Human coxsackievirus A8 (strain Donovan), Coxsackievirus A10 (isolate TA111R), Coxsackievirus A10 (strain CA10/JX2545/2017), Coxsackievirus A12 (isolate D89), Coxsackievirus A12 (strain QD-LXH535/SD/CHN/2009), Coxsackievirus A14 (strain MAD-72-07), Coxsackievirus A14 (isolate SEN-14-254), Human coxsackievirus A14 (strain G-14), Coxsackievirus A16 (isolate AH17-18/AH/East/CHN/2017-02-12), Coxsackievirus A16 (isolate CV-A16/HVN08.039_HA_GIANGVNM/2008), Coxsackievirus B1 (strain RO-98-1-74), Coxsackievirus B1 (strain CVB1/XM0108), Coxsackievirus B1 (strain B1/Groningen/2011), Coxsackievirus B2 (strain 13-2380-2_B2), Coxsackievirus B2 (strain 14L), Coxsackievirus B2 (strain 08-749-Shimane08-JPN), Coxsackievirus B2 (strain RW41-2/YN/CHN/2012), Coxsackievirus B2 (isolate BCH314), Coxsackievirus B3 (isolate B307), Coxsackievirus B3 (isolate 2001-5), Coxsackievirus B3 (isolate DHO9Y/JS/2012), Coxsackievirus B4 (isolate B401), Coxsackievirus B4 (isolate CV-B4/P11/2013/China), Coxsackievirus B4 (isolate Edwards CB4), Coxsackievirus B5 (isolate B501), Coxsackievirus B5 (strain USA/MI/2009-23030), Coxsackievirus B6 (isolate 99148/XZ/CHN/1999), Coxsackievirus B6 (strain LEV15), Coxsackievirus A9 (strain A744/YN/CHN/2009), Coxsackievirus A9 (isolate 2-MRS2013), Coxsackievirus A1 (clone V18A), Coxsackievirus A1 (isolate KS-ZPHO1F/XJ/CHN/2011), Coxsackievirus A11 (isolate CV-A11_66122), Coxsackievirus A13 (clone V4B), Coxsackievirus A13 (strain BAN01-10637), Coxsackievirus A19 (strain 2019103106/XX/CHN/2019), Coxsackievirus A19 (strain 8663), Coxsackievirus A20 (strain CAM1976), Coxsackievirus A21 (isolate 12MYKLU412), Coxsackievirus A21 (strain NIV17-608-2), Coxsackievirus A22 (strain 438913), Coxsackievirus A24 (strain 20693_84_CV-A24), Coxsackievirus A15 (strain G-9), Coxsackievirus A18 (strain CAM1972), Human rhinovirus A2 (strain 12L4), Human rhinovirus A2 (strain USA/2018/CA-RGDS-1062), Human rhinovirus A2 (X02316), Human rhinovirus A7 (strain ATCC VR-1117), Human rhinovirus A8 (strain ATCC VR-1118), Human rhinovirus A9 (isolate F01), Human rhinovirus A9 (isolate F02), Human rhinovirus A9 (strain ATCC VR-489), Human rhinovirus A10 (strain ATCC VR-1120), Human rhinovirus A11 (strain RvA11/USA/2021/XHZLKL), Human rhinovirus A11 (strain SCH-107), Human rhinovirus A11 (EF173414), Human rhinovirus A12 (isolate p211), Human rhinovirus A12 (EF173415), Human rhinovirus A13 (strain ATCC VR-1123), Human rhinovirus A13 (isolate F03), Human rhinovirus A15 (isolate 7002), Human rhinovirus A15 (DQ473493), Human rhinovirus A16 (isolate KC939), Human rhinovirus A16 (HRVPP), Human rhinovirus A18 (strain HRVA18/03/ZJ/CHN/2017), Human rhinovirus 18 (strain ATCC VR-1128), Human rhinovirus 19 (strain ATCC VR-1129), Human rhinovirus A20 (strain RvA20/USA/2021/B4Q4QT), Human rhinovirus A22 (strain RvA22/USA/2021/WBLGNP), Human Rhinovirus A23 (strain RvA23/USA/2021/JZHYZ6), Human rhinovirus A24 (strain RvA24/USA/2021/QZ8RX3), Human Rhinovirus A25 (strain RvA25/USA/2021/A8F6KW), Human Rhinovirus A28 (strain RvA28/USA/2021/ADMJHA), Human Rhinovirus A29 (strain RvA29/USA/2021/273658-4), Human rhinovirus A30 (strain MCL-18-H-1135), Human rhinovirus A31 (strain RvA31/USA/2021/273760-4), Human rhinovirus A32 (strain ATCC VR-1142), Human rhinovirus A33 (strain ATCC VR-330), Human rhinovirus A34 (strain ATCC VR-1144), Human rhinovirus A36 (DQ473505.1), Human rhinovirus A38 (strain ATCC VR-1148), Human rhinovirus A39 (strain ATCC VR-340), Human rhinovirus A40 (strain 7D5), Human rhinovirus A41 (strain SC9861), Human rhinovirus A43 (strain ATCC VR-1153), Human rhinovirus A44 (DQ473499), Human rhinovirus A45 (strain ATCC VR-1155), Human rhinovirus A46 (strain RvA46/USA/2021/6EEDHN), Human rhinovirus A47 (strain ATCC VR-1157), Human rhinovirus A49 (isolate F04), Human rhinovirus A50 (strain ATCC VR-517), Human rhinovirus A51 (strain ATCC VR-1161), Human rhinovirus A53 (DQ473507), Human rhinovirus A54 (strain ATCC VR-1164), Human rhinovirus A55 (DQ473511), Human rhinovirus A56 (strain ATCC VR-1166), Human rhinovirus A57 (isolate fs ship #1-hrv-57), Human rhinovirus A58 (strain ATCC VR-1168), Human rhinovirus A59 (strain 16-J2), Human rhinovirus A60 (strain ATCC VR-1473), Human rhinovirus A61 (strain SCH-99), Human rhinovirus A62 (strain ATCC VR-1172), Human rhinovirus A63 (strain ATCC VR-1173), Human rhinovirus A64 (strain ATCC VR-1174), Human rhinovirus A65 (strain ATCC VR-1175), Human rhinovirus A66 (strain ATCC VR-1176), Human rhinovirus A67 (strain ATCC VR-1177), Human rhinovirus A68 (strain ATCC VR-1178), Human rhinovirus A71 (strain ATCC VR-1181), Human rhinovirus A74 (DQ473494), Human rhinovirus A75 (DQ473510), Human rhinovirus A76 (strain ATCC VR-1186), Human rhinovirus A77 (strain ATCC VR-1187), Human Rhinovirus A78 (strain RvA78/USA/2021/177499), Human rhinovirus A80 (strain ATCC VR-1190), Human rhinovirus A81 (isolate F06), Human rhinovirus A82 (strain ATCC VR-1192), Human rhinovirus A85 (strain RvA85/USA/2021/AR424A), Human rhinovirus A88 (DQ473504.1), Human rhinovirus A90 (strain ATCC VR-1291), Human rhinovirus A94 (strain ATCC VR-1295), Human rhinovirus A95 (strain ATCC VR-1301), Human rhinovirus A96 (strain ATCC VR-1296), Human rhinovirus A98 (strain RvA98/USA/2021/W58KP8), Human rhinovirus A100 (strain ATCC VR-1300), Human rhinovirus A101 (strain SC1124), Human rhinovirus A103 (strain MCL-18-H-1122), Human rhinovirus B3 (NC_038312.1), Human rhinovirus B4 (DQ473490.1), Human rhinovirus B5 (strain ATCC VR-485), Human rhinovirus B6 (DQ473486.1), Human rhinovirus B17 (EF173420), Human rhinovirus B26 (strain ATCC VR-1136), Human rhinovirus B35 (strain ATCC VR-1145), Human rhinovirus B37 (EF173423), Human rhinovirus B42 (strain ATCC VR-338), Human rhinovirus B48 (DQ473488), Human rhinovirus B52 (isolate F10), Human rhinovirus B69 (strain ATCC VR-1179), Human rhinovirus B70 (DQ473489), Human rhinovirus B72 (strain ATCC VR-1182), Human rhinovirus B79 (isolate ZB/CHN/18), Human rhinovirus B83 (strain ATCC VR-1193), Human rhinovirus B84 (strain ATCC VR-1194), Human rhinovirus B86 (strain ATCC VR-1196), Human rhinovirus B91 (strain RvB91/USA/2021/95333), Human rhinovirus B92 (strain ATCC VR-1293), Human rhinovirus B93 (EF173425), Human rhinovirus B97 (strain ATCC VR-1297), Human rhinovirus B99 (strain ATCC VR-1299), Human rhinovirus C2 (isolate 470389), Human rhinovirus C6 (strain RvC6/USA/2021/LCP8K8), Human rhinovirus C8 (strain RvC8/USA/2021/7N6PM0), Human rhinovirus C9 (strain RvC9/USA/2021/96D92H), Human rhinovirus C10 (strain QCE), Human rhinovirus C11 (strain SC9849), Human rhinovirus C12 (strain RvC12/USA/2021/044858), Human rhinovirus C15 (strain RvC15/USA/2021/SUSM75), Human rhinovirus C17 (strain RvC17/USA/2021/T3RVH2), Human rhinovirus C23 (strain RvC23/USA/2021/ULVLFU), Human rhinovirus C30 (strain USA/2015/CA-RGDS-1045), Human rhinovirus C31 (strain RvC31/USA/2021/B8JUE1), Human rhinovirus C32 (strain USA/CA/RGDS-2016-1008), Human rhinovirus C34 (strain RvC34/USA/2021/BYRST7), Human rhinovirus C35 (strain RvC35/USA/2021/70881), Human rhinovirus C36 (strain RvC36/USA/2021/PEXCU4), Human rhinovirus C39 (strain RvC39/USA/2021/71206), Human rhinovirus C40 (strain RvC40/USA/2021/70389), Human rhinovirus C41 (strain USA/CA/2016-RGDS-1006), Human rhinovirus C42 (strain RvC42/USA/2021/278730), Human rhinovirus C43 (strain SC174), Human rhinovirus C47 (isolate CA-RGDS-1001), Human rhinovirus C50 (strain human/Australia/SG1/2008), Human rhinovirus C51 (isolate LZ508), Human rhinovirus C54 (isolate D3490), Human rhinovirus C56 (strain RvC56/USA/2021/466615), Enterovirus E (isolate HeN-A2), Enterovirus F (isolate HeN-B62), Enterovirus G (EV-G/Pig/JPN/Kana-Uchi13/2019/G1_PL-CP), Enterovirus I Dromedary camel enterovirus (strain 19CC), Bovine enterovirus GX20-1, Goat enterovirus (isolate NMG-F37), Aimelvirus 1 (strain gpai001), Ampivirus A1 (strain NEWT/2013/HUN), Equine rhinitis A virus (strain PERV-1), Foot-and-mouth disease virus—type A (isolate A/BR19-16_08 dpi_CB-RF), Foot-and-mouth disease virus—type Asia 1 (isolate Mazbi/QOL-UVAS-Pak/2006), Foot-and-mouth disease virus—type C (isolate KEN/1/2004), Foot-and-mouth disease virus O (isolate o6pirbright iso58), Foot-and-mouth disease virus—type SAT 1 (isolate TAN/3/80), Duck hepatitis A virus 1 (strain R85952), Turkey avisivirus (isolate USA-IN1), Bopivirus sp (strain bovine/TV-9682/2019-HUN), Encephalomyocarditis virus (ZM12/14), Human TMEV-like cardiovirus (NC_010810), Saffold virus 3 (NGT07-987), Human cosavirus A (strain AM326/BRA-AM/2017), Cosavirus F (strain NGR_2017_NHP_CV), Canine picodicistrovirus (strain 209), Equine rhinitis B virus 1, Simian hepatitis A virus, Hepatovirus D2 (isolate KS111230Crimig2011), Rodent hepatovirus (KEF121Sigmas2012), Hepatovirus G2 (isolate FO1AF48Rhilan2010), Loch Leven virus (isolate MW12_1o), Hunnivirus 05VZ (isolate 05VZ-75-RAT099), Melegrivirus A (NC_023858), Canine picomavirus, Turdivirus 3, Pasivirus A3 (strain swine/Zsana1/2013/HUN), Passerivirus (sp. strain waxbill/DB01/HUN/2014), Wenling sharpspine skate picornavirus (strain DHBYCGS18742), Picomaviridae (sp. rodent/RL/PicoV/FJ2015), Avian sapelovirus, Marmot sapelovirus 2 (strain HT6), Bat picornavirus (isolate BtPV/13585-58/M.dau/DK/2014), Bat picornavirus LMA6 (isolate DesRot/Peru/LMA6_F_DrPicoV), Sicinivirus A1 (isolate JSY), Sicinivirus A5 (strain RS/BR/2015/1), Sicinivirus (sp. isolate Environment/NLD/2019NE_7 picoma_3), Porcine teschovirus 10 (strain Vir 460/88), Tremovirus A (isolate GDs29), Yili Teratoscincus roborowskii picornavirus 1 (strain LPWC175499), Canine kobuvirus (US-PC0082), Feline kobuvirus (strain FK-13), Feline kobuvirus (strain WHJ-1), Kobuvirus (dog/AN211D/USA/2009), Murine kobuvirus 1 (isolate MKV1/NYC/2014/M014/0146), Kobuvirus sewage Kathmandu (isolate KoV-SewK™), Bovine kobuvirus (strain IL35164), Kobuvirus cattle/Kagoshima-1-22-KoV/2014/JPN (Kagoshima-1-22-KoV/2014/JPN), Caprine kobuvirus (isolate MN1/2018), Ferret kobuvirus (isolate MpKoV38), Grey squirrel kobuvirus (isolate UK 2010), Marmot kobuvirus (strain HT9), Ovine kobuvirus (isolate SKoV-China/SWUN/AB18/2019), Human parechovirus type 1 (PicoBank/HPeV1/a virus p123), Human parechovirus 3 (strain CAU14/2015/KR), Human parechovirus 4 (isolate 1(251176-02), Human parechovirus 5 (strain CT86-6760), Human parechovirus 5 (4112/SapporoC/July/2018), Human parechovirus 6 (strain: NI1561-2000), Human parechovirus 6 (isolate AFW), Human parechovirus 7, Human parechovirus 14 (clone V3C), Human parechovirus 17 (isolate 157Chzj058), Human parechovirus 18 (isolate 11Chzj207), Human parechovirus 19 (isolate 67Chzj11), Ljungan virus strain 145SL (isolate 145SLG), Ljungan virus M1146, Ljungan virus 64-7855, Rattus tanezumi parechovirus (strain Wencheng-Rt386-3), Parechovirus (sp. strain Parchzj-6), Baskerville virus, Bemisia tabaci picoma-like virus 1 (isolate CAU-Q1), British Admiral virus (isolate MW13_1o), Carfax virus, Chicken picornavirus 4 (isolate 5C), Chicken picornavirus 5 (isolate 27C), Chicken proventriculitis virus (isolate CPV/Korea/03), Zebrafish picomavirus-1 (strain NCSZCF/ZfPV/2015/North Carolina/USA), Duck picomavirus (duck/FC22/China/2017), Eotetranychus kankitus picorna-like virus (strain EKPLV.abc9), Falcon picomavirus, Feline picornavirus (strain 661F), French Guiana picomavirus (isolate French_Guiana Picornavirus), Leveillula taurica associated picoma-like virus 1 (isolate PM-A DN31116), Moran virus, Mus musculus picomavirus (strain Wencheng-Mm283), Ovine picomavirus, Pigeon mesivirus 2 (strain pigeon/GALII5-PiMeV/2011/HUN), Red-necked stint Picornavirus B-like, Sphenigellan virus, Sphenimaju virus, Washington bat picomavirus, Waterwitch virus (isolate MW03_1o), Aphid lethal paralysis virus, Cricket paralysis virus, Drosophila C virus (strain EB), Homalodisca coagulata virus-1, Antheraea pernyi iflavirus (isolate LnApIV-02), Isla virus (strain Cx 1773-5), Chaetoceros socialis f. radians RNA virus, and Apple latent spherical virus.

[0113] The polynucleotides provided by the disclosure have the activity of initiating translation of the circular nucleic acid molecule, and can mediate an expression process of a protein in the circular nucleic acid molecule, which achieves highly efficient translation and expression of the protein and provides a good application basis for the application of the circular nucleic acid molecule.

[0114] In some embodiments, the disclosure provides a polynucleotide (i) having the activity of initiating translation of a circular nucleic acid molecule, where the polynucleotide includes a nucleotide sequence shown in any one of SEQ ID NOs: 1 to 548. Preferably, the polynucleotide includes a nucleotide sequence shown in SEQ ID NOs: 1, 2, 3, 4, 9, 10, 11, 13, 14, 15, 17, 18, 19, 20, 25, 26, 27, 28, 41, 42, 45, 46, 51, 56, 59, 72, 79, 91, 98, 101, 104, 106, 107, 110, 115, 116, 117, 118, 119, 122, 123, 125, 127, 129, 130, 135, 139, 165, 179, 180, 183, 186, 188, 198, 200, 215, 216, 217, 218, 219, 220, 221, 222, 223, 225, 227, 228, 229, 230, 231, 232, 233, 234, 235, 236, 239, 240, 242, 243, 244, 245, 246, 247, 248, 249, 250, 251, 252, 253, 254, 255, 256, 257, 258, 261, 262, 263, 264, 265, 266, 267, 268, 269, 270, 272, 273, 274, 275, 276, 278, 279, 280, 281, 282, 283, 284, 285, 286, 287, 289, 291, 293, 294, 296, 298, 301, 302, 303, 304, 305, 306, 307, 308, 309, 310, 311, 312, 314, 315, 317, 318, 319, 321, 322, 323, 324, 326, 329, 331, 332, 333, 334, 335, 336, 348, 385, 387, 389, 392, 393, 394, 395, 406, 436, 438, 439, 441, 445, 457, 460, 496, 504, 507, 509, 511, 514, and 534.

[0115] A polynucleotide shown in any sequence of SEQ ID NOs: 1 to 548 obtained via screening in the disclosure can recruit a ribosome in the circular nucleic acid molecule to initiate translation of the circular nucleic acid molecule. A polynucleotide shown in a preferred sequence mediates the protein expression level of the circular nucleic acid molecule to be significantly higher than that of CVB3 IRES, which can improve the expression level of the polypeptide and protein of interest, thereby providing abundant translation initiation elements for use of the circular nucleic acid molecule in preparing a protein, serving as vaccines, producing a therapeutic protein, serving as a means of gene therapy, etc.

[0116] Although the circular nucleic acid molecule has extremely high application potential in protein expression and prevention or treatment of clinical diseases, the sequences that can be used to initiate translation of circular nucleic acid molecules have not been found in large numbers. The screening method provided by the disclosure provides abundant translation initiation sequences for circular nucleic acid molecules, and has an important value for broadening industrial and clinical application of the circular nucleic acid molecule.

[0117] In some embodiments, the polynucleotide further includes a mutant sequence (ii) of any nucleotide sequence shown in (i), where the mutant sequence has a mutant nucleotide at one or more positions of any corresponding sequence shown in (i), and the mutant sequence has the activity of initiating translation of the circular nucleic acid molecule.

[0118] In the disclosure, the mutant sequence refers to a polynucleotide that contains a change (that is, substitution, insertion and/or deletion) at one or more (for example, several) positions relative to a “wild-type” or “comparative” nucleotide sequence, where the substitution means substituting a different nucleotide for a nucleotide occupying a position. Deletion refers to removal of a nucleotide occupying a certain position. Insertion refers to addition of a nucleotide at a position adjacent to and immediately following a nucleotide occupying a position.

[0119] In some specific embodiments, the mutant sequence includes one or more nucleotides deleted from or added to a 5′ end of any corresponding nucleotide sequence shown in (i). In some specific embodiments, the mutant sequence includes one or more nucleotides deleted from or added to a 3′ end of any corresponding nucleotide sequence shown in (i). In some specific embodiments, the mutant sequence includes one or more nucleotides deleted, added and/or substituted inside any corresponding nucleotide sequence shown in (i).

[0120] In the disclosure, the mutant sequence may have an increased activity of initiating translation of the circular nucleic acid molecule, or retained or at least partially retained activity of initiating translation of the circular nucleic acid molecule compared with a non-mutated nucleotide sequence. Specifically, as long as the mutated nucleotide does not cause loss of the mutant sequence's activity of initiating translation of the circular nucleic acid molecule, the mutant sequence falls within the scope of the disclosure.

[0121] In some embodiments, the polynucleotide having the activity of initiating translation of the circular nucleic acid molecule further includes: a nucleotide sequence that can be reversely complementary to a hybridized sequence of the nucleotide sequence shown in (i) or (ii) under a highly stringent hybridization condition or a very highly stringent hybridization condition and that has the activity of initiating translation of the circular nucleic acid molecule.

[0122] In some embodiments, the polynucleotide having the activity of initiating translation of the circular nucleic acid molecule further includes a nucleotide sequence having at least 70%, 71%, 72%, 73%, 74%, 75%, 76%, 77%, 78%, 79%, 80%, 81%, 82%, 83%, 84%, 85%, 86%, 87%, 88%, 89%, 90%, 91%, 92%, 93%, 94%, 95%, 96%, 97%, 98%, or 99% (including all ranges and percentages between these values) sequence identity with the nucleotide sequence shown in any one of (i) or (ii) and having the activity of initiating translation of the circular nucleic acid molecule.

[0123] In some embodiments, the disclosure provides use of the polynucleotide in at least one of (a₁)-(a₂):

(a₁) initiating translation of a circular nucleic acid molecule, or preparing a product for initiating translation of a circular nucleic acid molecule; and
(a₂) increasing a protein expression level of a circular nucleic acid molecule, or preparing a product for increasing a protein expression level of a circular nucleic acid molecule.

[0124] The polynucleotide provided by the disclosure is used for initiating protein translation of the circular nucleic acid molecule, and has high translation activity, thereby implementing stable and efficient expression of the protein of interest.

### Circular Nucleic Acid Molecule

[0125] The circular nucleic acid molecule provided by the disclosure includes the polynucleotide shown in any sequence in (i). The circular nucleic acid molecule has high protein expression efficiency and have a great application potential in the fields such as industrial protein production, nucleic acid vaccines, expression of therapeutic proteins, and gene therapies.

[0126] In some embodiments, the circular nucleic acid molecule is a circular RNA molecule. More specifically, the circular nucleic acid molecule is a circular mRNA molecule including a coding region encoding a polypeptide of interest. The coding region of the circular mRNA molecule is operably linked to the polynucleotide having the activity of initiating translation of the circular nucleic acid molecule, thereby initiating the protein translation process of the circular mRNA molecule.

[0127] In some embodiments, the circular mRNA molecule further includes one or more of the following elements: a 5′ spacer region, a 3′ spacer region, a second exon, and a first exon.

[0128] In some preferred embodiments, the circular mRNA molecule includes the following sequentially linked elements: a second exon E2, a 5′ spacer region, the polynucleotide having the activity of initiating translation of the circular nucleic acid molecule, a coding region, a 3′ spacer region, and a first exon E1. In the disclosure, it is found that the circular mRNA molecule with this structure has an increased protein expression level after insertion of the polynucleotide provided by the disclosure.

[0129] In the disclosure, the coding region may contain a nucleotide sequence encoding any protein. The sequence of the coding region is not specifically limited in the present disclosure, which is set according to a type of to-be-expressed protein of interest.

[0130] In some specific embodiments, the 5′ spacer region includes a nucleotide sequence shown in any one of SEQ ID NOs: 549-550, or a sequence having at least 80%, 81%, 82%, 83%, 84%, 85%, 86%, 87%, 88%, 89%, 90%, 91%, 92%, 93%, 94%, 95%, 96%, 97%, 98%, 99%, or 100% sequence identity with the nucleotide sequence shown in any one of SEQ ID NOs: 549-550.

[0131] In some specific embodiments, the 3′ spacer region includes a nucleotide sequence shown in any one of SEQ ID NOs: 551-553, or a sequence having at least 80%, 81%, 82%, 83%, 84%, 85%, 86%, 87%, 88%, 89%, 90%, 91%, 92%, 93%, 94%, 95%, 96%, 97%, 98%, 99%, or 100% sequence identity with the nucleotide sequence shown in any one of SEQ ID NOs: 551-553.

[0132] In some specific embodiments, the first exon E1 includes a nucleotide sequence shown in SEQ ID NO: 554, or a sequence having at least 80%, 81%, 82%, 83%, 84%, 85%, 86%, 87%, 88%, 89%, 90%, 91%, 92%, 93%, 94%, 95%, 96%, 97%, 98%, 99%, or 100% sequence identity with the nucleotide sequence shown in SEQ ID NO: 554.

[0133] In some specific embodiments, the second exon E2 includes a nucleotide sequence shown in SEQ ID NO: 555, or a sequence having at least 80%, 81%, 82%, 83%, 84%, 85%, 86%, 87%, 88%, 89%, 90%, 91%, 92%, 93%, 94%, 95%, 96%, 97%, 98%, 99%, or 100% sequence identity with the nucleotide sequence shown in SEQ ID NO: 555.

[0134] The disclosure finds that nucleotide sequences of the foregoing elements can further promote a protein translation process of the circular mRNA molecule mediated by the polynucleotide, and improve the activity of initiating protein translation by the polynucleotide.

[0135] In some other embodiments, the circular nucleic acid molecule may also include other types of elements or element sequences, which is not specifically limited in the disclosure, as long as the polynucleotides shown in SEQ ID NOs: 1 to 548 in the disclosure can initiate protein translation of the circular nucleic acid molecule to achieve high-level expression of the protein.

[0136] In some embodiments, the disclosure provides a cyclization precursor nucleic acid molecule, which can be cyclized to form the circular nucleic acid molecule described above. Further, the cyclization precursor nucleic acid molecule is a cyclization precursor mRNA molecule.

[0137] In some specific embodiments, the cyclization precursor mRNA molecule further includes one or more of the following elements: a 5′ homology arm, a 3′ intron, a second exon, a 5′ spacer region, a coding region, a 3′ spacer region, a first exon, a 5′ intron and a 3′ homology arm.

[0138] In some specific embodiments, the cyclization precursor mRNA molecule includes the following sequentially linked elements:

a 5′ homology arm, a 3′ intron, a second exon, a 5′ spacer region, the polynucleotide having the activity of initiating translation of the circular nucleic acid molecule, a coding region, a 3′ spacer region, a first exon, a 5′ intron and a 3′ homology arm.

[0139] The cyclization precursor mRNA molecule is cyclized by the following process: via a ribozyme feature of the intron, under the trigger of GTP, a junction of the 5′ intron and the first exon is broken; and a ribozyme cleavage of the first exon further attacks a junction of the 3′ intron and the second exon, causing break of the junction, the 3′ intron is dissociated, and the first exon and the second exon are connected to form the circular mRNA molecule.

[0140] In some specific embodiments, the 5′ homology arm includes a sequence having at least 80%, 81%, 82%, 83%, 84%, 85%, 86%, 87%, 88%, 89%, 90%, 91%, 92%, 93%, 94%, 95%, 96%, 97%, 98%, 99%, or 100% sequence identity with a nucleotide sequence shown in any one of SEQ ID Nos: 558-559.

[0141] In some specific embodiments, the 3′ homology arm includes a sequence having at least 80%, 81%, 82%, 83%, 84%, 85%, 86%, 87%, 88%, 89%, 90%, 91%, 92%, 93%, 94%, 95%, 96%, 97%, 98%, 99%, or 100% sequence identity with a nucleotide sequence shown in any one of SEQ ID Nos: 560-561.

[0142] In some specific embodiments, the 5′ intron includes a sequence having at least 80%, 81%, 82%, 83%, 84%, 85%, 86%, 87%, 88%, 89%, 90%, 91%, 92%, 93%, 94%, 95%, 96%, 97%, 98%, 99%, or 100% sequence identity with the nucleotide sequence shown in any one of SEQ ID No: 556.

[0143] In some specific embodiments, the 3′ intron includes a sequence having at least 80%, 81%, 82%, 83%, 84%, 85%, 86%, 87%, 88%, 89%, 90%, 91%, 92%, 93%, 94%, 95%, 96%, 97%, 98%, 99%, or 100% sequence identity with the nucleotide sequence shown in any one of SEQ ID No: 557.

[0144] In some embodiments, the disclosure provides a recombinant nucleic acid molecule capable of being transcribed to form the cyclization precursor mRNA molecule described above. To enable further transcription of the recombinant nucleic acid molecule to form the mRNA molecule, the recombinant nucleic acid molecule may also contain a regulatory sequence. For example, the regulatory sequence is a T7 promoter linked to the upstream of the 5′ homology arm.

[0145] In some embodiments, the disclosure provides a recombinant expression vector including the recombinant nucleic acid molecule described above. Vectors connecting the recombinant nucleic acid molecules can be various types of vectors commonly used in the art, for example, a pUC57 plasmid, etc. Further, the recombinant nucleic acid molecule contains a restriction site, so that a linearized vector suitable for transcription is obtained after the recombinant expression vector is digested by the enzyme.

[0146] In some embodiments, the disclosure provides a recombinant host cell, including at least one of the circular mRNA molecule, the cyclization precursor mRNA molecule, the recombinant nucleic acid molecule, and the recombinant expression vector.

### EXAMPLE

[0147] Other objectives, features and advantages of the disclosure will become obvious from the following detailed description. However, it should be understood that the detailed description and specific examples (while showing specific embodiments of the disclosure) are provided for explanatory purposes only. Because after reading the detailed descriptions, various changes and modifications made within the spirit and scope of the disclosure will become obvious to those skilled in the art.

[0148] The experimental techniques and methods used in this example are conventional technical methods unless otherwise specified. For example, the experimental methods in which specific conditions are not specified in the following examples are usually performed according to conventional conditions for example, conditions described in Sambrook et al., Molecular Cloning: A Laboratory Manual (New York: Cold Spring Harbor Laboratory Press, 1989), or conditions recommended by a manufacturer. The materials, reagents, and the like used in the examples are officially commercially available unless otherwise specified.

### Example 1: Screening of Sequence Having Activity of Initiating Translation of Circular Nucleic Acid Molecule

[0149] (1) Nucleotide sequences derived from different species of viruses were obtained and used as a set of to-be-predicted sequences.
(2) A set of 583 sample IRES sequences of which the activity had been experimentally verified were downloaded from iresite database (http://www.iresite.org).
(3) One-hot encoding: to-be-encoded objects were determined as (1) a set of obtained to-be-predicted sequences, and (2) a set of selected IRES sequences, wherein the categorical variables were A, T, C, and G; and each sample had 4 features, and the features were converted into binary vectors for representation. Taking SEQ ID NO: 1 as an example, details are shown in Table 4 below:

TABLE 4

| | T | T | A | A | A | A | C | A | G | . . . | C | A | C | A | T | C | A | A | A |
|---|---|---|---|---|---|---|---|---|---|---|---|---|---|---|---|---|---|---|---|
| A | 0 | 0 | 1 | 1 | 1 | 1 | 0 | 1 | 0 | . . . | 0 | 1 | 0 | 1 | 0 | 0 | 1 | 1 | 1 |
| T | 1 | 1 | 0 | 0 | 0 | 0 | 0 | 0 | 0 | . . . | 0 | 0 | 0 | 0 | 1 | 0 | 0 | 0 | 0 |
| C | 0 | 0 | 0 | 0 | 0 | 0 | 1 | 0 | 0 | . . . | 1 | 0 | 1 | 0 | 0 | 1 | 0 | 0 | 0 |
| G | 0 | 0 | 0 | 0 | 0 | 0 | 0 | 0 | 1 | . . . | 0 | 0 | 0 | 0 | 0 | 0 | 0 | 0 | 0 |

(4) Calculation of Levenshtein distances: Levenshtein distances between each to-be-predicted sequence and the selected 583 sample IRES sequences were calculated, and an average was taken. In calculative mathematics, the Levenshtein distance between two strings a and b satisfy that levab(i, j)=max(i, j), where if min(i, j)=0, levab(i, j)=min(levab(i−1, j)+1, levab(i, j−1)+1, and levab(i−1, j−1)+1) (ai !=bj), where ai !=bj is an indicator function. When ai !=bj, a value is 1, otherwise, a value is 0. It should be noted that in the minimum item, a first part corresponds to a deletion operation (from a to b), a second part corresponds to an insertion operation, and a third part corresponds to a substitution operation. The average of the Levenshtein distances between the to-be-predicted sequences and the 583 sample IRES sequences was calculated. The maximum average was 1.0. If the average was greater than 0.5, it could be preliminarily determined that the to-be-predicted sequence could contain the IRES; if the average was greater than 0.75, it was determined that the to-be-predicted sequence highly likely contained the IRES. The average of the Levenshtein distances was shown in Table 5 below.

TABLE 5

| SEQ | | |
|---|---|---|
| ID | | Average of |
| NO: | Species | Levenshtein distances |
| 1 | Echovirus E1 (strain Farouk/ATCC | 0.5808049313271684 |
| | VR-1038) | |
| 2 | Echovirus E2 (strain USA/2013-19511) | 0.6188037379332704 |
| 3 | Echovirus E3 (isolate JSev001) | 0.5000632986851516 |
| 4 | Echovirus E3 (strain 61246-70294) | 0.6082589761442534 |
| 5 | Echovirus E3 (strain 61247-622) | 0.6073517314258708 |
| 6 | Echovirus E3 (strain 61245-2710) | 0.6061754786067719 |
| 7 | Echovirus E3 (strain 63038-1131) | 0.6018930633212138 |
| 8 | Echovirus E3 (strain 63040-70881) | 0.5970295357872576 |
| 9 | Echovirus E3 (isolate HNWY-01) | 0.5136681381373834 |
| 10 | Echovirus E3 (isolate ECHO3_INMI1) | 0.48382071550949773 |
| 11 | Echovirus E3 (isolate Env_2016_ | 0.5793434993451302 |
| | Sep_E-3) | |
| 12 | Echovirus E3 (strain Sakhalin-11.293) | 0.5541478951256454 |
| 13 | Echovirus E3 (strain HAI/2016-23067A) | 0.5473101688541446 |
| 14 | Echovirus E3 (strain HAI/2016-23066) | 0.5527812726135902 |
| 15 | Echovirus E3 (strain HAI/2016-23065A) | 0.5667800957051863 |
| 16 | Echovirus E3 (strain HAI/2016-23061) | 0.565103313316246 |
| 17 | Echovirus E3 (strain HAI/2016-23056) | 0.5511865958122903 |
| 18 | Echovirus E3 (strain HAI/2016-23051A) | 0.5332834592896887 |
| 19 | Echovirus E3 (strain HAI/2016-23050) | 0.5433437375965232 |
| 20 | Echovirus E3 (isolate 123-R2) | 0.5412315202753394 |
| 21 | Echovirus E3 (strain | 0.5748063226382968 |
| | Sakhalin/10_DU145) | |
| 22 | Echovirus E3 (strain Sakhalin/10_RD) | 0.5764759708465969 |
| 23 | Echovirus E3 (isolate E3/TO/BR/018) | 0.6523338974338045 |
| 24 | Echovirus E4 (strain 2F5) | 0.5643061256681934 |
| 25 | Echovirus 4 (strain AUS250G) | 0.5652543471609274 |
| 26 | Echovirus E4 (strain Pesacek) | 0.5175196720569315 |
| 27 | Echovirus E5 | 0.6039594525829762 |
| 28 | Echovirus E6 | 0.6040261442378229 |
| 29 | Echovirus 9 (strain Barty) | 0.6225482743952616 |
| 30 | Echovirus 9 (strain Hill) | 0.48864035578803333 |
| 31 | Echovirus E11 | 0.49839484274883805 |
| 32 | Echovirus E12 | 0.6661344256078723 |
| 33 | Echovirus E13 (strain HAI/ | 0.5116509698669113 |
| | 2017-23078B) | |
| 34 | Echovirus E13 (strain HAI/2016-23072) | 0.5322682925773098 |
| 35 | Echovirus E13 (strain HAI/2016-23073) | 0.5518852133130182 |
| 36 | Echovirus E13 (strain HAI/2016-23075) | 0.5711015376985186 |
| 37 | Echovirus E13 (strain HAI/2017- | 0.5047549476513821 |
| | 23082B) | |
| 38 | Echovirus E14 (strain RO-81-1-79) | 0.5517610733049713 |
| 39 | Echovirus E14 (isolate ETH_P19/E14_ | 0.5416219091902743 |
| | 2016) | |
| 40 | Echovirus E14 (isolate NSW-V04-2012- | 0.7877088231180686 |
| | ECHO14) | |
| 41 | Echovirus E14 (isolate | 0.6311207338131573 |
| | E14/P843/2013/China) | |
| 42 | Echovirus E14 (isolate | 0.619622313996729 |
| | E14/P968/2013/China) | |
| 43 | Echovirus E15 (strain CH 96-51) | 0.5875706239418529 |
| 44 | Echovirus E16 (isolate ETH_P4/E16_ | 0.5084421973726146 |
| | 2016) | |
| 45 | Echovirus E16 (isolate | 0.6072950786401917 |
| | E16/P85/2013/China) | |
| 46 | Echovirus E16 (strain Harrington) | 0.5539581839578673 |
| 47 | Echovirus 17 (strain CHHE-29) | 0.4830894420137125 |
| 48 | Echovirus E18 (isolate | 0.5674112910391006 |
| | PC06/JS/CHN/2019) | |
| 49 | Echovirus E18 (strain E18/JXY2-2/2019) | 0.5913386342445188 |
| 50 | Echovirus E18 (isolate | 0.5967486267240393 |
| | QD9/SD/CHN/2019) | |
| 51 | Echovirus E18 (isolate LJ/0530/2019) | 0.5669165361014139 |
| 52 | Echovirus E18 (strain 12J3) | 0.5323674807300197 |
| 53 | Echovirus E18 (strain USA/2015/CA- | 0.5718321627431914 |
| | RGDS-1049) | |
| 54 | Echovirus E18 (isolate E18- | 0.5749871390587905 |
| | 221/HeB/CHN/2015) | |
| 55 | Echovirus E18 (strain 12G5) | 0.518938908507651 |
| 56 | Echovirus E18 (isolate E18- | 0.5966532826722779 |
| | 393/HeB/CHN/2015) | |
| 57 | Echovirus E18 (isolate E18- | 0.5802033135408055 |
| | 398/HeB/CHN/2015) | |
| 58 | Echovirus E18 (isolate | 0.5943115754334534 |
| | E18-HeB15-54462/HeB/CHN/2015) | |
| 59 | Echovirus E18 (isolate | 0.6114826956352949 |
| | E18-HeB15-54498/HeB/CHN/2015) | |
| 60 | Echovirus E18 (isolate | 0.5599577313314069 |
| | ETH_P12/E18_2016) | |
| 61 | Echovirus E18 (isolate | 0.8016918133770672 |
| | NSW-V13A-2008-ECHO18) | |
| 62 | Echovirus E18 (strain | 0.6162734978883699 |
| | A83/YN/CHN/2016) | |
| 63 | Echovirus E18 (strain | 0.5666784066223288 |
| | A86/YN/CHN/2016) | |
| 64 | Echovirus E18 (isolate Jena/ST9524/10) | 0.5893255734301206 |
| 65 | Echovirus E18 (isolate Jena/VI10227/10) | 0.6001690065872023 |
| 66 | Echovirus E18 (isolate Kor05-ECV18- | 0.6109617945798228 |
| | 054cn) | |
| 67 | Echovirus E19 (strain HAI/2016- | 0.5619266173651392 |
| | 23039B) | |
| 68 | Echovirus E19 (strain HAI/2016- | 0.5852261104020761 |
| | 23036D) | |
| 69 | Echovirus E19 (strain HAI/2016- | 0.5360399210418508 |
| | 23037D) | |
| 70 | Echovirus E19 (strain HAI/2016- | 0.5367222933761491 |
| | 23037E) | |
| 71 | Echovirus E19 (strain HAI/2016- | 0.5547631164415266 |
| | 23042B) | |
| 72 | Echovirus E19 (strain HAI/2016- | 0.5919939389506693 |
| | 23046B) | |
| 73 | Echovirus E19 (strain HAI/2016-23047) | 0.5975375363696883 |
| 74 | Echovirus E19 (strain HAI/2016-23054) | 0.5619266173651392 |
| 75 | Echovirus E19 (strain HAI/2016-23052) | 0.5651548841304406 |
| 76 | Echovirus E19 (strain HAI/2016-23053) | 0.5568186393967952 |
| 77 | Echovirus E19 (strain HAI/2016- | 0.5442751663714708 |
| | 23062D) | |
| 78 | Echovirus E19 (strain HAI/2016- | 0.5339339475591622 |
| | 23063B) | |
| 79 | Echovirus E19 (strain HAI/2016- | 0.5334519938961495 |
| | 23064B) | |
| 80 | Echovirus E19 (strain HAI/2016- | 0.5422485564948548 |
| | 23067B) | |
| 81 | Echovirus E19 (strain HAI/2016- | 0.5873800159040743 |
| | 23070B) | |
| 82 | Echovirus E19 (strain HAI/2017-23079) | 0.5896767177946751 |
| 83 | Echovirus E19 (strain HAI/2017- | 0.5525749211468359 |
| | 23081A) | |
| 84 | Echovirus E19 (isolate | 0.6556927383023295 |
| | ETH_P3/E19_2016) | |
| 85 | Echovirus E19 (strain NGR_2014) | 0.6312425608990878 |
| 86 | Echovirus E19 (isolate PDV_BLR_IN) | 0.5143236489882879 |
| 87 | Echovirus E19 (strain Burke) | 0.6212483255693274 |
| 88 | Echovirus E19 (strain K/542/81) | 0.5779384310070684 |
| 89 | Echovirus E20 (isolate E20/TO/BR/016) | 0.549495873428977 |
| 90 | Echovirus E20 (strain HAI/2016- | 0.5375351921169472 |
| | 23038B) | |
| 91 | Echovirus E20 (strain HAI/2016- | 0.513256714606494 |
| | 23041B) | |
| 92 | Echovirus E20 (strain HAI/2016- | 0.5399463374966579 |
| | 23085B) | |
| 93 | Echovirus E20 (strain HAI/2016- | 0.5589240448799935 |
| | 23065C) | |
| 94 | Echovirus E20 (strain HAI/2016- | 0.5374206583984363 |
| | 23068B) | |
| 95 | Echovirus E20 (strain HAI/2016-23069) | 0.5215856312718054 |
| 96 | Echovirus E20 (strain HAI/2017- | 0.528269598790309 |
| | 23080B) | |
| 97 | Echovirus E20 (strain HAI/2017- | 0.5430769693666437 |
| | 23081B) | |
| 98 | Echovirus E20 (HAI/2016-23077B) | 0.565615067758941 |
| 99 | Echovirus E20 (strain HAI/2017- | 0.5432259671714722 |
| | 23083C) | |
| 100 | Echovirus E20 (strain KM-EV20-2010) | 0.6445794685904701 |
| 101 | Echovirus E20 (strain JV-1) | 0.5125551016507701 |
| 102 | Echovirus E21 (strain | 0.5635612795804391 |
| | 553/YN/CHN/2013) | |
| 103 | Echovirus E21 (strain Farina) | 0.5158668453401536 |
| 104 | Echovirus E24 (strain VEN/2018-23086) | 0.615957202123764 |
| 105 | Echovirus E24 (isolate | 0.6621440382199824 |
| | PZ18G/JS/20120703) | |
| 106 | Echovirus E24 (strain DeCamp) | 0.5934294468111005 |
| 107 | Echovirus E25 (strain USA/2016-19521) | 0.6822112112544876 |
| 108 | Echovirus E25 (strain USA/2018-23126) | 0.5597967905509564 |
| 109 | Echovirus E25 (strain 10-4339-2) | 0.600702055000706 |
| 110 | Echovirus E25 (strain USA/CA/RGDS- | 0.5162776722043619 |
| | 2017-1010) | |
| 111 | Echovirus E25 (isolate NSW-V07-2007- | 0.6023913581937407 |
| | ECHO25) | |
| 112 | Echovirus E25 (isolate NSW-V08-2008- | 0.6336353171076778 |
| | ECHO25) | |
| 113 | Echovirus E25 (isolate NSW-V09-2008- | 0.883906966620007 |
| | ECHO25) | |
| 114 | Echovirus E25 (isolate NSW-V58-2010- | 0.8780882139795565 |
| | ECHO25) | |
| 115 | Echovirus E25 (strain 61241-70868) | 0.564412311786525 |
| 116 | Echovirus E25 (strain | 0.6391212557009869 |
| | E25/ZE-wly/Zhejiang/CHN/2005) | |
| 117 | Echovirus E25 (isolate Jena/AN1380/10) | 0.6101193067296762 |
| 118 | Echovirus E25 (strain XM0297) | 0.6288150695867872 |
| 119 | Echovirus E25 (strain | 0.6331686090146701 |
| | E25/2010/CHN/BJ) | |
| 120 | Echovirus E25 (isolate E25SD2010CHN) | 0.7132777071268944 |
| 121 | Echovirus E25 (strain HN-2) | 0.6002392009789782 |
| 122 | Echovirus E25 (strain JV-4) | 0.5608386821308077 |
| 123 | Echovirus E26 (strain Coronel) | 0.6062654480897788 |
| 124 | Echovirus E27 (isolate | 0.5156137700552272 |
| | ETH_P8/E27_2016) | |
| 125 | Echovirus E27 (strain Bacon) | 0.5324156384056804 |
| 126 | Echovirus E29 (strain HAI/2016- | 0.5106046557252641 |
| | 23048B) | |
| 127 | Echovirus E29 (strain JV-10) | 0.5676063967690148 |
| 128 | Echovirus E30 (isolate E30/TO/BR/032) | 0.5191346267944849 |
| 129 | Echovirus E30 (isolate | 0.5408130119094549 |
| | TL12C/NM/CHN/2016) | |
| 130 | Echovirus E30 (isolate | 0.5420959375494635 |
| | TL7C/NM/CHN/2016) | |
| 131 | Echovirus E30 (strain USA/2018-23125) | 0.536644633332944 |
| 132 | Echovirus E30 | 0.4751706742638117 |
| | (Echo30/Hokkaido. JPN/21208/2017) | |
| 133 | Echovirus E30 (strain USA/2015/CA- | 0.6359793363771304 |
| | RGDS-1046) | |
| 134 | Echovirus E30 (strain USA/2017/CA- | 0.48976987236468716 |
| | RGDS-1048) | |
| 135 | Echovirus E30 (isolate B001/USA/2016) | 0.5503500355147808 |
| 136 | Echovirus E30 (strain 16-I10) | 0.5185927407158059 |
| 137 | Echovirus E30 (strain 1-B4-TW) | 0.6228628861449574 |
| 138 | Echovirus E30 (strain 2002-59) | 0.5932845071630329 |
| 139 | Echovirus E30 (strain KM/A363/09) | 0.581569350680876 |
| 140 | Echovirus E30 (isolate 1-MRS2013) | 0.47383274194638425 |
| 141 | Echovirus E30 (isolate 3-MRS2013) | 0.4913222932049281 |
| 142 | Echovirus E30 (isolate 4-MRS2013) | 0.5227575120062752 |
| 143 | Echovirus E30 (isolate 2012EM161) | 0.6416981198957746 |
| 144 | Echovirus E30 (isolate | 0.5874930044754398 |
| | E30SD2010CHN) | |
| 145 | Echovirus E30 (isolate ECV30/ | 0.6171243419257207 |
| | GX10/05) | |
| 146 | Echovirus E30 (strain Kor08-ECV30) | 0.5901817224847268 |
| 147 | Echovirus E30 (isolate FDJS03_84) | 0.6117929305771026 |
| 148 | Echovirus 30 (strain Bastianni) | 0.6304113799969484 |
| 149 | Echovirus 31 (strain Caldwell) | 0.5835167998403462 |
| 150 | Echovirus 32 (strain PR-10) | 0.5381486644772421 |
| 151 | Echovirus E33 (strain | 0.5540823631079579 |
| | YNK35/CHN/2013) | |
| 152 | Echovirus E33 (strain | 0.5546686912617399 |
| | YNA12/CHN/2013) | |
| 153 | Human poliovirus 1 (isolate CHN- | 0.46093472546403114 |
| | Hainan/93-2) | |
| 154 | Human poliovirus 1 (isolate RUS39223) | 0.4944504596055311 |
| 155 | Human poliovirus 1 (isolate Pak-1) | 0.4529764960438368 |
| 156 | Human poliovirus 1 (isolate TJK35363 | 0.47550274864547154 |
| | clone 6) | |
| 157 | Human poliovirus 1 (strain 3788ALB96) | 0.49583982996764026 |
| 158 | Human poliovirus 1 (isolate | 0.47147797909732997 |
| | CHN15115/Xinjiang/CHN/2011) | |
| 159 | Human poliovirus 1 (isolate 29690_c1) | 0.4863153346047116 |
| 160 | Human poliovirus 1 (strain | 0.4888103555140552 |
| | NIE1018316) | |
| 161 | Human poliovirus 1 (isolate | 0.505474818199679 |
| | EGY1218587) | |
| 162 | Human poliovirus 1 (isolate 558/ | 0.4403001742175432 |
| | BRA-PE/88) | |
| 163 | Human poliovirus 2 (isolate | 0.38043403445965707 |
| | Env2008_E2450) | |
| 164 | Human poliovirus 2 (strain | 0.504944926831137 |
| | CHA1218985) | |
| 165 | Human poliovirus 2 (isolate | 0.4173046683916367 |
| | Env2008_E3218) | |
| 166 | Human poliovirus 2 (strain MAD- | 0.52746373854172 |
| | 2593-11) | |
| 167 | Human poliovirus 3 (strain | 0.5010478884678368 |
| | PAK1019536) | |
| 168 | Human poliovirus 3 (isolate | 0.5149400086491789 |
| | Env08_E2886) | |
| 169 | Human poliovirus 3 (strain SWI10947) | 0.5393583610003766 |
| 170 | Human poliovirus 3 (strain FIN84-2493) | 0.4766221231527159 |
| 171 | Human poliovirus 3 (strain USOL- | 0.3807851977468085 |
| | D-bac) | |
| 172 | Enterovirus A71 (isolate 2019-EV-A71- | 0.45928824230619214 |
| | R398) | |
| 173 | Enterovirus A71 (strain USA/2018- | 0.4946164989680169 |
| | 23296) | |
| 174 | Enterovirus A71 (strain 16L) | 0.48767133883437264 |
| 175 | Enterovirus A76 (strain 10-3291-2) | 0.5599856118331821 |
| 176 | Human enterovirus A76 (AY697458) | 0.5721179844840873 |
| 177 | Enterovirus A89 (strain | 0.6243150331320565 |
| | KSYPH-TRMH22F/XJ/CHN/2011) | |
| 178 | Human enterovirus A89 (AY697459.1) | 0.6370139483603551 |
| 179 | Enterovirus A90 (strain 10-2879-1) | 0.6004341224919545 |
| 180 | Enterovirus A90 (isolate | 0.5975333034151918 |
| | SCH05F/XJ/CHN/2011) | |
| 181 | Human enterovirus A90 (isolate | 0.6043038181896778 |
| | 01336/SD/CHN/EV90) | |
| 182 | Human enterovirus A90 (AB192877.1) | 0.6116112430729701 |
| 183 | Human enterovirus A90 (isolate | 0.643517724294421 |
| | F950027) | |
| 184 | Human enterovirus 91 (AY697461.1) | 0.6048459802558553 |
| 185 | Human enterovirus A92 (strain RJG7) | 0.5853760319381408 |
| 186 | Simian enterovirus SV19 (strain | 0.5544977376443397 |
| | NOLA-2) | |
| 187 | Simian enterovirus SV19 (isolate | 0.568907052748546 |
| | cg4006) | |
| 188 | Simian enterovirus SV19 (strain M19s | 0.6242828045157908 |
| | (P2)) | |
| 189 | Simian enterovirus SV43 (strain OM112t | 0.4845942720425571 |
| | (P12)) | |
| 190 | Simian enterovirus SV46 (isolate | 0.6454386639433694 |
| | cg5400) | |
| 191 | Simian enterovirus SV46 (strain RNM5) | 0.5922665552823908 |
| 192 | Enterovirus B69 (strain Toluca-1) | 0.5447702203495234 |
| 193 | Enterovirus B69 (isolate 15_491) | 0.5334464307221062 |
| 194 | Enterovirus B73 (isolate | 0.5271925358182022 |
| | 088/SD/CHN/04) | |
| 195 | Human enterovirus B73 | 0.45862999756243844 |
| | (isolate 2776-82) | |
| 196 | Human enterovirus 74 (strain | 0.47943329626637027 |
| | Rikaze-136/XZ/CHN/2010) | |
| 197 | Enterovirus B75 (isolate | 0.529659619602786 |
| | Y16/XZ/CHN/2007) | |
| 198 | Enterovirus B75 (isolate | 0.523149183564562 |
| | 102/SD/CHN/97) | |
| 199 | Enterovirus B75 (strain USA/OK85- | 0.5872937895620794 |
| | 10362) | |
| 200 | Human enterovirus B77 (strain | 0.5579681499833907 |
| | USA/TX97-10394) | |
| 201 | Human enterovirus B77 (strain | 0.6247112360229483 |
| | CF496-99) | |
| 202 | Human enterovirus B79 (strain 17- | 0.4979564834992029 |
| | 2255-1_E79) | |
| 203 | Human enterovirus B79 (AB426610.1) | 0.4979564834992029 |
| 204 | Human enterovirus B79 (strain | 0.5734561092760242 |
| | USA/CA79-10384) | |
| 205 | Enterovirus B80 (isolate | 0.5502864862184469 |
| | HT-LYKH203F/XJ/CHN/2011) | |
| 206 | Human enterovirus B80 (isolate | 0.6102199651974916 |
| | HZ01/SD/CHN/2004) | |
| 207 | Enterovirus B81 (isolate | 0.6273765538555169 |
| | 99279/XZ/CHN/1999) | |
| 208 | Human enterovirus B81 (strain | 0.5795917247161194 |
| | USA/CA68-10389) | |
| 209 | Human enterovirus B82 (strain | 0.628152354260522 |
| | USA/CA64-10390) | |
| 210 | Human enterovirus B83 (strain | 0.6830088828075495 |
| | USA/CA76-10392) | |
| 211 | Enterovirus B83 (isolate | 0.5031269090299197 |
| | 99245/XZ/CHN/1999) | |
| 212 | Enterovirus B83 (isolate AFP341-GD- | 0.5236572112470147 |
| | CHN-2001) | |
| 213 | Enterovirus B83 (isolate | 0.6595326398455966 |
| | 246/YN/CHN/08) | |
| 214 | Enterovirus B84 (strain | 0.4854150433063059 |
| | GHA:BAR:TES/2017) | |
| 215 | Enterovirus B84 (isolate | 0.492275836192338 |
| | AFP452/GD/CHN/2004) | |
| 216 | Human enterovirus B84 (isolate | 0.5502736397479051 |
| | CIV2003-10603) | |
| 217 | Human enterovirus B85 (strain | 0.5453661557001908 |
| | HTPS-MKLH04F/XJ/CHN/2011) | |
| 218 | Human enterovirus B85 (strain | 0.5692568631304266 |
| | BAN00-10353) | |
| 219 | Human enterovirus B86 (strain | 0.45406533968630014 |
| | BAN00-10354) | |
| 220 | Enterovirus B87 (isolate | 0.5859291472196817 |
| | LY02/SD/CHN/2000) | |
| 221 | Enterovirus B88 (strain 11-4644-1) | 0.6059751516648656 |
| 222 | Human enterovirus B88 (strain | 0.5876178405925064 |
| | BAN01-10398) | |
| 223 | Enterovirus B93 (isolate | 0.5958473867612367 |
| | 99052/XZ/CHN/1999) | |
| 224 | Enterovirus B93 (isolate 38-03) | 0.6611988574125724 |
| 225 | Human enterovirus B97 (strain | 0.6090638980650727 |
| | 99188/SD/CHN/1999/EV97) | |
| 226 | Human enterovirus B97 (strain | 0.5855907778137233 |
| | DT94-0227) | |
| 227 | Human enterovirus B97 (strain | 0.5891395752114498 |
| | BAN99-10355) | |
| 228 | Human enterovirus B98 (strain: | 0.5481295942421415 |
| | T92-1499) | |
| 229 | Human enterovirus B100 (isolate | 0.5615476816393387 |
| | BAN2000-10500) | |
| 230 | Human enterovirus B101 (strain | 0.5804558234312348 |
| | CIV03-10361) | |
| 231 | Enterovirus B106 (isolate | 0.6111962521257411 |
| | AKS-AWT-AFP2F/XJ/CHN/2011) | |
| 232 | Human enterovirus 106 (isolate | 0.627848181236402 |
| | 148/YN/CHN/12) | |
| 233 | Enterovirus C96 (strain VEN/2018- | 0.5239188987301402 |
| | 23123A) | |
| 234 | Enterovirus C96 (isolate | 0.5431014836327113 |
| | 127/SD/CHN/1991) | |
| 235 | Enterovirus C96 (clone V13C) | 0.5335353378492713 |
| 236 | Enterovirus C99 (strain 10L1) | 0.44273607915910396 |
| 237 | Human enterovirus C104 (isolate | 0.534829532144603 |
| | kvv585-16-TS) | |
| 238 | Human enteroviru sC105 (strain | 0.5136168835701784 |
| | USA/OK/2014-19362) | |
| 239 | Human enterovirus C116 (strain 126) | 0.5041249369599711 |
| 240 | Enterovirus C117 (strain JX-C117-40- | 0.5089142278031911 |
| | 2017) | |
| 241 | Human enterovirus C118 (isolate | 0.5327115465313895 |
| | CQ5185) | |
| 242 | Human enterovirus D68 (strain Fermon) | 0.6406183150822587 |
| 243 | Enterovirus D68 (TBp-13-Ph209) | 0.6357935500071978 |
| 244 | Enterovirus D70 (strain JPN/1989-23292) | 0.48319438334610393 |
| 245 | Enterovirus D94 (strain ANG/2010- | 0.6118996021578769 |
| | 23293) | |
| 246 | Human enterovirus D94 (isolate 19/04) | 0.6563359275753122 |
| 247 | Enterovirus D111 (strain ANG/2010- | 0.5699262010560427 |
| | 23294) | |
| 248 | Enterovirus D111 (isolate D111-NGR- | 0.6540324157649857 |
| | KAT-1263) | |
| 249 | Simian enterovirus J103 (isolate cg8227) | 0.5816105743551186 |
| 250 | Coxsackievirus A2 (isolate HN202009) | 0.5660415279272476 |
| 251 | Coxsackievirus A2 (isolate 16027) | 0.5570056987639195 |
| 252 | Coxsackievirus A2 (isolate | 0.588488871495302 |
| | CVA2-1388-M14/XY/CHN/2017) | |
| 253 | Coxsackievirus A2 (isolate | 0.5730736914008895 |
| | CVA2/Shenzhen50/CHN/2012) | |
| 254 | Coxsackievirus A2 (strain 2260165) | 0.5673882504795857 |
| 255 | Coxsackievirus A4 (strain | 0.612479022791526 |
| | CA4/JX2204/2014) | |
| 256 | Coxsackievirus A4 (isolate | 0.6593754344515906 |
| | HK458564/2016) | |
| 257 | Coxsackievirus A5 (isolate | 0.5330698387701938 |
| | CV-A5-3487-M14-XY-CHN-2017) | |
| 258 | Coxsackievirus A5 (strain | 0.4796578730433841 |
| | CVA5/13164/HUN/2015) | |
| 259 | Coxsackievirus A6 (isolate DN1501) | 0.5804411533180829 |
| 260 | Coxsackievirus A6 (strain RYN-A1205) | 0.610277500494171 |
| 261 | Coxsackievirus A7 (strain MAD- | 0.554535220828899 |
| | 3101-11) | |
| 262 | Coxsackievirus A8 (isolate 13- | 0.6106897997489629 |
| | 467/GS/CHN/2013) | |
| 263 | Coxsackievirus A8 (isolate | 0.5801726038359443 |
| | C177/CHW/AUS/2017) | |
| 264 | Coxsackievirus A8 (isolate | 0.586953851288419 |
| | CV-A8/P82/2013/China) | |
| 265 | Human coxsackievirus A8 (strain | 0.5150727919892554 |
| | Donovan) | |
| 266 | Coxsackievirus A10 (isolate TA111R) | 0.4524759463951004 |
| 267 | Coxsackievirus A10 (strain | 0.5428384858952928 |
| | CA10/JX2545/2017) | |
| 268 | Coxsackievirus A12 (isolate D89) | 0.565045437938567 |
| 269 | Coxsackievirus A12 (strain | 0.5879470769607731 |
| | QD-LXH535/SD/CHN/2009) | |
| 270 | Coxsackievirus A14 (strain MAD-72-07) | 0.532912909014806 |
| 271 | Coxsackievirus A14 (isolate SEN-14- | 0.48600953120323537 |
| | 254) | |
| 272 | Human coxsackievirus A14 (strain G-14) | 0.5715593648178132 |
| 273 | Coxsackievirus A16 (isolate | 0.572283259514582 |
| | AH17-18/AH/East/CHN/2017-02-12) | |
| 274 | Coxsackievirus A16 (isolate | 0.6277458261568424 |
| | CV-A16/HVN08.039_HA_ | |
| | GIANGVNM/2008) | |
| 275 | Coxsackievirus B1 (strain RO-98-1-74) | 0.5963608708457682 |
| 276 | Coxsackievirus B1 (strain | 0.6268768394234222 |
| | CVB1/XM0108) | |
| 277 | Coxsackievirus B1 (strain | 0.6956909587709591 |
| | B1/Groningen/2011) | |
| 278 | Coxsackievirus B2 (strain 13-2380-2_B2) | 0.5121588584672281 |
| 279 | Coxsackievirus B2 (strain 14L) | 0.5566278173482062 |
| 280 | Coxsackievirus B2 (strain 08-749- | 0.6036711279221575 |
| | Shimane08-JPN) | |
| 281 | Coxsackievirus B2 (strain RW41- | 0.5927153164349939 |
| | 2/YN/CHN/2012) | |
| 282 | Coxsackievirus B2 (isolate BCH314) | 0.6335429762723401 |
| 283 | Coxsackievirus B3 (isolate B307) | 0.609382492589016 |
| 284 | Coxsackievirus B3 (isolate 2001-5) | 0.6437150913791714 |
| 285 | Coxsackievirus B3 (isolate | 0.5841942032562798 |
| | DH09Y/JS/2012) | |
| 286 | Coxsackievirus B4 (isolate B401) | 0.618892464759692 |
| 287 | Coxsackievirus B4 (isolate CV- | 0.534810658553231 |
| | B4/P11/2013/China) | |
| 288 | Coxsackievirus B4 (isolate Edwards | 0.601591405889082 |
| | CB4) | |
| 289 | Coxsackievirus B5 (isolate B501) | 0.5917236122059703 |
| 290 | Coxsackievirus B5 (strain USA/MI/2009- | 0.588820040103409 |
| | 23030) | |
| 291 | Coxsackievirus B6 (isolate | 0.50141787779587 |
| | 99148/XZ/CHN/1999) | |
| 292 | Coxsackievirus B6 (strain LEV15) | 0.5095790788495197 |
| 293 | Coxsackievirus A9 (strain | 0.5420268010852607 |
| | A744/YN/CHN/2009) | |
| 294 | Coxsackievirus A9 (isolate 2-MRS2013) | 0.6350156522901241 |
| 295 | Coxsackievirus A1 (clone V18A) | 0.5394405618905521 |
| 296 | Coxsackievirus A1 (isolate | 0.51830044840028 |
| | KS-ZPH01F/XJ/CHN/2011) | |
| 297 | Coxsackievirus A11 (isolate CV- | 0.5310888269417202 |
| | A11_66122) | |
| 298 | Coxsackievirus A13 (clone V4B) | 0.5490320929091147 |
| 299 | Coxsackievirus A13 (strain BAN01- | 0.5669533986135938 |
| | 10637) | |
| 300 | Coxsackievirus A19 (strain | 0.5700953710266742 |
| | 2019103106/XX/CHN/2019) | |
| 301 | Coxsackievirus A19 (strain 8663) | 0.5401802576685366 |
| 302 | Coxsackievirus A20 (strain CAM1976) | 0.5065831156049192 |
| 303 | Coxsackievirus A21 (isolate | 0.5016165072075285 |
| | 12MYKLU412) | |
| 304 | Coxsackievirus A21 (strain NIV17- | 0.5697204907511733 |
| | 608-2) | |
| 305 | Coxsackievirus A22 (strain 438913) | 0.4985049695836058 |
| 306 | Coxsackievirus A24 (strain | 0.5597840865484324 |
| | 20693_84_CV-A24) | |
| 307 | Coxsackievirus A15 (strain G-9) | 0.4860516766145873 |
| 308 | Coxsackievirus A18 (strain CAM1972) | 0.5592051513670969 |
| 309 | Human rhinovirus A2 (strain 12L4) | 0.6086990950584722 |
| 310 | Human rhinovirus A2 (strain | 0.5850583251521847 |
| | USA/2018/CA-RGDS-1062) | |
| 311 | Human rhinovirus A2 (X02316) | 0.6603437212679295 |
| 312 | Human rhinovirus A7 (strain ATCC | 0.6941714121155632 |
| | VR-1117) | |
| 313 | Human rhinovirus A8 (strain ATCC | 0.6010836874691167 |
| | VR-1118) | |
| 314 | Human rhinovirus A9 (isolate F01) | 0.6235082376098245 |
| 315 | Human rhinovirus A9 (isolate F02) | 0.65264278855691 |
| 316 | Human rhinovirus A9 (strain ATCC VR- | 0.645181918253583 |
| | 489) | |
| 317 | Human rhinovirus A10 (strain ATCC | 0.6409288123602587 |
| | VR-1120) | |
| 318 | Human rhinovirus A11 (strain | 0.6338185597096168 |
| | RvA11/USA/2021/XHZLKL) | |
| 319 | Human rhinovirus A11 (strain SCH-107) | 0.6403359605567032 |
| 320 | Human rhinovirus A11 (EF173414) | 0.6395014628823757 |
| 321 | Human rhinovirus A12 (isolate p211) | 0.6898313539110299 |
| 322 | Human rhinovirus A12 (EF173415) | 0.6712016699615532 |
| 323 | Human rhinovirus A13 (strain | 0.6763621443513593 |
| | ATCC VR-1123) | |
| 324 | Human rhinovirus A13 (isolate F03) | 0.6662891838497392 |
| 325 | Human rhinovirus A15 (isolate 7002) | 0.6174221915751837 |
| 326 | Human rhinovirus A15 (DQ473493) | 0.7110001569419926 |
| 327 | Human rhinovirus A16 (isolate KC939) | 0.5581278567135982 |
| 328 | Human rhinovirus A16 (HRVPP) | 0.5789455711377887 |
| 329 | Human rhinovirus A18 (strain | 0.6719505462668024 |
| | HRVA18/03/ZJ/CHN/2017) | |
| 330 | Human rhinovirus 18 (strain ATCC VR- | 0.6698880033189915 |
| | 1128) | |
| 331 | Human rhinovirus 19 (strain ATCC VR- | 0.5687796185785023 |
| | 1129) | |
| 332 | Human rhinovirus A20 (strain | 0.7373440855592669 |
| | RvA20/USA/2021/B4Q4QT) | |
| 333 | Human rhinovirus A22 (strain | 0.6340294722121228 |
| | RvA22/USA/2021/WBLGNP) | |
| 334 | Human Rhinovirus A23 (strain | 0.5980563343450229 |
| | RvA23/USA/2021/JZHYZ6) | |
| 335 | Human rhinovirus A24 (strain | 0.7097046515083459 |
| | RvA24/USA/2021/QZ8RX3) | |
| 336 | Human Rhinovirus A25 (strain | 0.641808457483705 |
| | RvA25/USA/2021/A8F6KW) | |
| 337 | Human Rhinovirus A28 (strain | 0.6671287008947643 |
| | RvA28/USA/2021/ADMJHA) | |
| 338 | Human Rhinovirus A29 (strain | 0.664814106173672 |
| | RvA29/USA/2021/273658-4) | |
| 339 | Human rhinovirus A30 (strain MCL-18- | 0.687113800664511 |
| | H-1135) | |
| 340 | Human rhinovirus A31 (strain | 0.673206538723218 |
| | RvA31/USA/2021/273760-4) | |
| 341 | Human rhinovirus A32 (strain ATCC | 0.641296258404341 |
| | VR-1142) | |
| 342 | Human rhinovirus A33 (strain ATCC | 0.6099256264329906 |
| | VR-330) | |
| 343 | Human rhinovirus A34 (strain ATCC | 0.6636464775561838 |
| | VR-1144) | |
| 344 | Human rhinovirus A36 (DQ473505.1) | 0.6606183633492794 |
| 345 | Human rhinovirus A38 (strain ATCC | 0.6780677904469626 |
| | VR-1148) | |
| 346 | Human rhinovirus A39 (strain ATCC | 0.5426717778888348 |
| | VR-340) | |
| 347 | Human rhinovirus A40 (strain 7D5) | 0.6924487889824577 |
| 348 | Human rhinovirus A41 (strain SC9861) | 0.7000947554928159 |
| 349 | Human rhinovirus A43 (strain ATCC | 0.6506184377433443 |
| | VR-1153) | |
| 350 | Human rhinovirus A44 (DQ473499) | 0.7033357020444904 |
| 351 | Human rhinovirus A45 (strain ATCC | 0.5919359167635694 |
| | VR-1155) | |
| 352 | Human rhinovirus A46 (strain | 0.707417026396848 |
| | RvA46/USA/2021/6EEDHN) | |
| 353 | Human rhinovirus A47 (strain ATCC | 0.693303085280375 |
| | VR-1157) | |
| 354 | Human rhinovirus A49 (isolate F04) | 0.6999255319324668 |
| 355 | Human rhinovirus A50 (strain ATCC | 0.6209333930491198 |
| | VR-517) | |
| 356 | Human rhinovirus A51 (strain ATCC | 0.6112131964489288 |
| | VR-1161) | |
| 357 | Human rhinovirus A53 (DQ473507) | 0.6405586364661005 |
| 358 | Human rhinovirus A54 (strain ATCC | 0.7369458660398449 |
| | VR-1164) | |
| 359 | Human rhinovirus A55 (DQ473511) | 0.5996301494815367 |
| 360 | Human rhinovirus A56 (strain ATCC | 0.7068649165104073 |
| | VR-1166) | |
| 361 | Human rhinovirus A57 (isolate fs ship#1- | 0.6939098322543827 |
| | hrv-57) | |
| 362 | Human rhinovirus A58 (strain ATCC | 0.6619016528440018 |
| | VR-1168) | |
| 363 | Human rhinovirus A59 (strain 16-J2) | 0.619082076496769 |
| 364 | Human rhinovirus A60 (strain ATCC | 0.6232091602878583 |
| | VR-1473) | |
| 365 | Human rhinovirus A61 (strain SCH-99) | 0.6193983920541493 |
| 366 | Human rhinovirus A62 (strain ATCC | 0.6362515976952244 |
| | VR-1172) | |
| 367 | Human rhinovirus A63 (strain ATCC | 0.586276987578181 |
| | VR-1173) | |
| 368 | Human rhinovirus A64 (strain ATCC | 0.6500992322829021 |
| | VR-1174) | |
| 369 | Human rhinovirus A65 (strain ATCC | 0.5957513866408007 |
| | VR-1175) | |
| 370 | Human rhinovirus A66 (strain ATCC | 0.6151296723206161 |
| | VR-1176) | |
| 371 | Human rhinovirus A67 (strain ATCC | 0.7145838589400889 |
| | VR-1177) | |
| 372 | Human rhinovirus A68 (strain ATCC | 0.6636916580444769 |
| | VR-1178) | |
| 373 | Human rhinovirus A71 (strain ATCC | 0.6467369610543777 |
| | VR-1181) | |
| 374 | Human rhinovirus A74 (DQ473494) | 0.7089676684681712 |
| 375 | Human rhinovirus A75 (DQ473510) | 0.5682285342979287 |
| 376 | Human rhinovirus A76 (strain ATCC | 0.6490012912556992 |
| | VR-1186) | |
| 377 | Human rhinovirus A77 (strain ATCC | 0.7207353185073148 |
| | VR-1187) | |
| 378 | Human Rhinovirus A78 (strain | 0.6349810678058351 |
| | RvA78/USA/2021/177499) | |
| 379 | Human rhinovirus A80 (strain ATCC | 0.7567640534727206 |
| | VR-1190) | |
| 380 | Human rhinovirus A81 (isolate F06) | 0.5902285748036626 |
| 381 | Human rhinovirus A82 (strain ATCC | 0.6184752333617372 |
| | VR-1192) | |
| 382 | Human rhinovirus A85 (strain | 0.6911259381314915 |
| | RvA85/USA/2021/AR424A) | |
| 383 | Human rhinovirus A88 (DQ473504.1) | 0.6290888593406224 |
| 384 | Human rhinovirus A90 (strain ATCC | 0.6792783261914022 |
| | VR-1291) | |
| 385 | Human rhinovirus A94 (strain ATCC | 0.6712198375496936 |
| | VR-1295) | |
| 386 | Human rhinovirus A95 (strain ATCC | 0.5711450262170426 |
| | VR-1301) | |
| 387 | Human rhinovirus A96 (strain ATCC | 0.5649887624921948 |
| | VR-1296) | |
| 388 | Human rhinovirus A98 (strain | 0.651281570455754 |
| | RvA98/USA/2021/W58KP8) | |
| 389 | Human rhinovirus A100 (strain ATCC | 0.7402268410622288 |
| | VR-1300) | |
| 390 | Human rhinovirus A101 (strain SC1124) | 0.6700188648996388 |
| 391 | Human rhinovirus A103 (strain MCL-18- | 0.6285775904071377 |
| | H-1122) | |
| 392 | Human rhinovirus B3 (NC_038312.1) | 0.6957073463601183 |
| 393 | Human rhinovirus B4 (DQ473490.1) | 0.6523603148752493 |
| 394 | Human rhinovirus B5 (strain ATCC VR- | 0.6314849776516597 |
| | 485) | |
| 395 | Human rhinovirus B6 (DQ473486.1) | 0.7058295528619624 |
| 396 | Human rhinovirus B17 (EF173420) | 0.6137949416494946 |
| 397 | Human rhinovirus B26 (strain ATCC | 0.6323383424251291 |
| | VR-1136) | |
| 398 | Human rhinovirus B35 (strain ATCC | 0.6178350517817417 |
| | VR-1145) | |
| 399 | Human rhinovirus B37 (EF173423) | 0.6504143837112901 |
| 400 | Human rhinovirus B42 (strain ATCC | 0.6067030654533153 |
| | VR-338) | |
| 401 | Human rhinovirus B48 (DQ473488) | 0.5967825023086031 |
| 402 | Human rhinovirus B52 (isolate F10) | 0.5283441929152388 |
| 403 | Human rhinovirus B69 | 0.5650162115124282 |
| | (strain ATCC VR-1179) | |
| 404 | Human rhinovirus B70 (DQ473489) | 0.5271324517314294 |
| 405 | Human rhinovirus B72 | 0.6840645186069668 |
| | (strain ATCC VR-1182) | |
| 406 | Human rhinovirus B79 | 0.634167704109742 |
| | (isolate ZB/CHN/18) | |
| 407 | Human rhinovirus B83 | 0.6468347349735741 |
| | (strain ATCC VR-1193) | |
| 408 | Human rhinovirus B84 | 0.6040703959556961 |
| | (strain ATCC VR-1194) | |
| 409 | Human rhinovirus B86 | 0.6758180164057123 |
| | (strain ATCC VR-1196) | |
| 410 | Human rhinovirus B91 (strain | 0.5715717789485494 |
| | RvB91/USA/2021/95333) | |
| 411 | Human rhinovirus B92 | 0.5941218825178537 |
| | (strain ATCC VR-1293) | |
| 412 | Human rhinovirus B93 (EF173425) | 0.6862621572627255 |
| 413 | Human rhinovirus B97 | 0.6830675238813152 |
| | (strain ATCC VR-1297) | |
| 414 | Human rhinovirus B99 | 0.7423360352063163 |
| | (strain ATCC VR-1299) | |
| 415 | Human rhinovirus C2 (isolate 470389) | 0.534776396667412 |
| 416 | Human rhinovirus C6 (strain | 0.5807370971985787 |
| | RvC6/USA/2021/LCP8K8) | |
| 417 | Human rhinovirus C8 (strain | 0.6248091989000637 |
| | RvC8/USA/2021/7N6PM0) | |
| 418 | Human rhinovirus C9 (strain | 0.5990726492043625 |
| | RvC9/USA/2021/96D92H) | |
| 419 | Human rhinovirus C10 (strain QCE) | 0.6518836182697529 |
| 420 | Human rhinovirus C11 (strain SC9849) | 0.543132357353825 |
| 421 | Human rhinovirus C12 (strain | 0.608778813515426 |
| | RvC12/USA/2021/044858) | |
| 422 | Human rhinovirus C15 (strain | 0.5438538174952772 |
| | RvC15/USA/2021/SUSM75) | |
| 423 | Human rhinovirus C17 (strain | 0.5997166499256588 |
| | RvC17/USA/2021/T3RVH2) | |
| 424 | Human rhinovirus C23 (strain | 0.5931273430822197 |
| | RvC23/USA/2021/ULVLFU) | |
| 425 | Human rhinovirus C30 (strain | 0.5587476022869116 |
| | USA/2015/CA-RGDS-1045) | |
| 426 | Human rhinovirus C31 (strain | 0.5419799360494493 |
| | RvC31/USA/2021/B8JUE1) | |
| 427 | Human rhinovirus C32 | |
| | USA/CA/RGDS-2016-1008) | |
| 428 | Human rhinovirus C34 (strain | 0.7219555207590616 |
| | RvC34/USA/2021/BYRST7) | |
| 429 | Human rhinovirus C35 (strain | 0.6066565786094078 |
| | RvC35/USA/2021/70881) | |
| 430 | Human rhinovirus C36 (strain | 0.4569698471657656 |
| | RvC36/USA/2021/PEXCU4) | |
| 431 | Human rhinovirus C39 (strain | 0.4569698471657656 |
| | RvC39/USA/2021/71206) | |
| 432 | Human rhinovirus C40 (strain | 0.534776396667412 |
| | RvC40/USA/2021/70389) | |
| 433 | Human rhinovirus C41 (strain | 0.5739885946964087 |
| | USA/CA/2016-RGDS-1006) | |
| 434 | Human rhinovirus C42 (strain | 0.4569698471657656 |
| | RvC42/USA/2021/278730) | |
| 435 | Human rhinovirus C43 (strain SC174) | |
| 436 | Human rhinovirus C47 | 0.43573353438827417 |
| | (isolate CA-RGDS-1001) | |
| 437 | Human rhinovirus C50 | |
| | human/Australia/SG1/2008) | |
| 438 | Human rhinovirus C51 (isolate LZ508) | |
| 439 | Human rhinovirus C54 (isolate D3490) | 0.5541056091187622 |
| 440 | Human rhinovirus C56 | |
| | RvC56/USA/2021/466615) | |

| | | |
|---|---|---|
| 441 | Enterovirus E (isolate HeN-A2) | |
| 442 | Enterovirus F (isolate HeN-B62) | 0.6827104751262314 |
| 443 | Enterovirus G | |
| | (EV-G/Pig/JPN/Kana-Uchi13/ | |
| | 2019/G1_PL-CP) | |
| 444 | Enterovirus I Dromedary | 0.6803640313322592 |
| | camel enterovirus (strain 19CC) | |
| 445 | Bovine enterovirus GX20-1 | 0.6999032547035025 |
| 446 | Goat enterovirus (isolate NMG-F37) | 0.5749860025515109 |
| 447 | Aimelvirus 1 (strain gpai001) | 0.6201715674199075 |
| 448 | Ampivirus A1 (strain NEWT/ | 0.9323539719175006 |
| | 2013/HUN) | |
| 449 | Equine rhinitis A virus (strain PERV-1) | 0.3831705530970938 |
| 450 | Foot-and-mouth disease | 0.3723932214177325 |
| | virus-type A (isolate | |
| | A/BR19-16_08dpi_CB-RF) | |
| 451 | Foot-and-mouth disease | 0.39597911530407054 |
| | virus-type Asia 1 (isolate | |
| | Mazbi/QOL-UVAS-Pak/2006) | |
| 452 | Foot-and-mouth disease virus-type C | 0.4116994640832622 |
| | (isolate KEN/1/2004) | |
| 453 | Foot-and-mouth disease virus O (isolate | 0.37162203822167583 |
| | o6pirbright iso58) | |
| 454 | Foot-and-mouth disease virus-type SAT | 0.5254343782017207 |
| | 1 (isolate TAN/3/80) | |
| 455 | Duck hepatitis A virus 1 (strain R85952) | 0.6275181632524537 |
| 456 | Turkey avisivirus (isolate USA-IN1) | 0.6604368143907475 |
| 457 | Bopivirus sp (strain bovine/TV- | 0.6136148346058375 |
| | 9682/2019-HUN) | |
| 458 | Encephalomyocarditis virus (ZM12/14) | 0.5759407101057598 |
| 459 | Human TMEV-like cardiovirus | 0.6160440238325338 |
| | (NC_010810) | |
| 460 | Saffold virus 3 (NGT07-987) | 0.5785142657527343 |
| 461 | Human cosavirus A (strain AM326/BRA- | 0.6459214807126546 |
| | AM/2017) | |
| 462 | Cosavirus F (strain | 0.681298284413891 |
| | NGR_2017_NHP_CV) | |
| 463 | Canine picodicistrovirus (strain 209) | 0.7121602455273517 |
| 464 | Equine rhinitis B virus 1 | 0.6446522725894651 |
| 465 | Simian hepatitis A virus | 0.8882930616152281 |
| 466 | Hepatovirus D2 (isolate | 0.8065465144168569 |
| | KS111230Crimig2011) | |
| 467 | Rodent hepatovirus | 0.8621242698393188 |
| | (KEF121Sigmas2012) | |
| 468 | Hepatovirus G2 (isolate | 0.5072492850339075 |
| | FO1AF48Rhilan2010) | |
| 469 | Loch Leven virus (isolate MW12_1o) | 0.4915700746191962 |
| 470 | Hunnivirus 05VZ (isolate 05VZ-75- | 0.5798312138955524 |
| | RAT099) | |
| 471 | Melegrivirus A (NC_023858) | 0.5007866812621884 |
| 472 | Canine picornavirus | 0.585517073705111 |
| 473 | Turdivirus 3 | 0.5670044734269162 |
| 474 | Pasivirus A3 (strain | 0.554440780148236 |
| | swine/Zsana1/2013/HUN) | |
| 475 | Passerivirus (sp. strain | 0.6756960353915241 |
| | waxbill/DB01/HUN/2014) | |
| 476 | Wenling sharpspine skate | 0.8711180982997228 |
| | picornavirus (strain | |
| | DHBYCGS18742) | |
| 477 | Picornaviridae (sp. | 0.5044225012290093 |
| | rodent/RL/PicoV/FJ2015) | |
| 478 | Avian sapelovirus | 0.5610691331462271 |
| 479 | Marmot sapelovirus 2 (strain HT6) | 0.42989625425608563 |
| 480 | Bat picornavirus (isolate | 0.7910329489378202 |
| | BtPV/13585-58/M.dau/DK/2014) | |
| 481 | Bat picornavirus LMA6 (isolate | 0.41126703719410074 |
| | DesRot/Peru/LMA6_F_DrPicoV) | |
| 482 | Sicinivirus A1 (isolate JSY) | 0.6617934019225871 |
| 483 | Sicinivirus A5 (strain RS/BR/2015/1) | 0.8774637425411811 |
| 484 | Sicinivirus (sp. isolate | 0.7127568022773857 |
| | Environment/NLD/2019/VE_7_ | |
| | picorna_3) | |
| 485 | Porcine teschovirus 10 (strain Vir | 0.6603721488740731 |
| | 460/88) | |
| 486 | Tremovirus A (isolate GDs29) | 0.6426327538163137 |
| 487 | Yili teratoscincus roborowskii | 0.6213002855664539 |
| | picornavirus 1 (strain | |
| | LPWC175499) | |
| 488 | Canine kobuvirus (US-PC0082) | 0.5323498073549009 |
| 489 | Feline kobuvirus (strain FK-13) | 0.5286234433047534 |
| 490 | Feline kobuvirus (strain WHJ-1) | 0.5257408247386066 |
| 491 | Kobuvirus (dog/AN211D/USA/2009) | 0.5766853662781989 |
| 492 | Murine kobuvirus 1 (isolate | 0.4765019774903171 |
| | MKV1/NYC/2014/M014/0146) | |
| 493 | Kobuvirus sewage Kathmandu (isolate | 0.03514619162735339 |
| | KoV-SewKTM) | |
| 494 | Bovine kobuvirus (strain IL35164) | 0.5715857791556381 |
| 495 | Kobuvirus cattle/Kagoshima-1-22- | 0.7456779628201752 |
| | KoV/2014/JPN | |
| | (Kagoshima-1-22-KoV/2014/JPN) | |
| 496 | Caprine kobuvirus (isolate MN1/2018) | 0.7708151827420604 |
| 497 | Ferret kobuvirus (isolate MpKoV38) | 0.5161622299258443 |
| 498 | Grey squirrel kobuvirus (isolate | 0.6824243956373283 |
| | UK 2010) | |
| 499 | Marmot kobuvirus (strain HT9) | 0.5330323362306334 |
| 500 | Ovine kobuvirus (isolate | 0.5821128962826022 |
| | SKoV-China/SWUN/AB18/2019) | |
| 501 | Human parechovirus type 1 | 0.6436236371421008 |
| | (PicoBank/HPeV1/a | |
| | virus p123) | |
| 502 | Human parechovirus 3 (strain | 0.5849548700178346 |
| | CAU14/2015/KR) | |
| 503 | Human parechovirus 4 (isolate | 0.6405392188756479 |
| | K251176-02) | |
| 504 | Human parechovirus 5 (strain | 0.5232472533461368 |
| | CT86-6760) | |
| 505 | Human parechovirus 5 | 0.5851346304628351 |
| | (4112/SapporoC/July/2018) | |
| 506 | Human parechovirus 6 (strain: | 0.6015672857195756 |
| | NII561-2000) | |
| 507 | Human parechovirus 6 (isolate AFW) | 0.5357912855744474 |
| 508 | Human parechovirus 7 | 0.6181992709124706 |
| 509 | Human parechovirus 14 (clone V3C) | 0.625122665026285 |
| 510 | Human parechovirus 17 | 0.6671483525005787 |
| | (isolate 157Chzj058) | |
| 511 | Human parechovirus | 0.6291761917207371 |
| | 18 (isolate 11Chzj207) | |
| 512 | Human parechovirus | 0.8063714501003619 |
| | 19 (isolate 67Chzj11) | |
| 513 | Ljungan virus strain | 0.6987317991060082 |
| | 145SL (isolate 145SLG) | |
| 514 | Ljungan virus M1146 | 0.6504659004799125 |
| 515 | Ljungan virus 64-7855 | 0.6223916484590848 |
| 516 | Rattus tanezumi parechovirus (strain | 0.5596739988540328 |
| | Wencheng-Rt386-3) | |
| 517 | Parechovirus (sp. strain Parchzj-6) | 0.5484680905353069 |
| 518 | Baskerville virus | 0.5798218777631448 |
| 519 | Bemisia tabaci picorna-like | 0.9186018006034752 |
| | virus 1 (isolate CAU-Q1) | |
| 520 | British Admiral virus (isolate MW13_1o) | 0.7526180196431712 |
| 521 | Carfax virus | 0.8170327013008536 |
| 522 | Chicken picornavirus 4 (isolate 5C) | 0.527590817500035 |
| 523 | Chicken picornavirus 5 (isolate 27C) | 0.5674808304619496 |
| 524 | Chicken proventriculitis virus (isolate | 0.45784182696650955 |
| | CPV/Korea/03) | |
| 525 | Zebrafish picornavirus-1 (strain | 0.6522458425852629 |
| | NCSZCF/ZfPV/2015/North | |
| | Carolina/USA) | |
| 526 | Duck picornavirus | 0.9186018006034752 |
| | (duck/FC22/China/2017) | |
| 527 | Eotetranychus kankitus picorna- | 0.9196267660332578 |
| | like virus (strain EKPLV.abc9) | |
| 528 | Falcon picornavirus | 0.6430851499966271 |
| 529 | Feline picornavirus (strain 661F) | 0.44267982288545704 |
| 530 | French Guiana picornavirus (isolate | 0.6619949125640623 |
| | French_Guiana_Picornavirus) | |
| 531 | Leveillula taurica associated | 0.9022087883082625 |
| | picorna-like virus 1 | |
| | (isolate PM-A_DN31116) | |
| 532 | Moran virus | 0.6323709195044684 |
| 533 | Mus musculus picornavirus (strain | 0.25196993122774 |
| | Wencheng-Mm283) | |
| 534 | Ovine picornavirus | 0.6705311251552103 |
| 535 | Pigeon mesivirus 2 (strain | 0.5926908737190554 |
| | pigeon/GALII5-PiMeV/2011/HUN) | |
| 536 | Red-necked stint Picornavirus B-like | 0.7090833184293232 |
| 537 | Sphenigellan virus | 0.7200148179128709 |
| 538 | Sphenimaju virus | 0.4798727791622594 |
| 539 | Washington bat picornavirus | 0.5869710349285941 |
| 540 | Waterwitch virus (isolate MW03_1o) | 0.5262417865726503 |
| 541 | Aphid lethal paralysis virus | 0.894268683930682 |
| 542 | Cricket paralysis virus | 0.6279496160894118 |
| 543 | Drosophila C virus (strain EB) | 0.8504610251517164 |
| 544 | Homalodisca coagulata virus-1 | 0.45695353371742126 |
| 545 | Antheraea pernyi iflavirus | 0.9233007083916378 |
| | (isolate LnApIV-02) | |
| 546 | Isla virus (strain Cx 1773-5) | 0.9177885606469574 |
| 547 | Chaetoceros socialis f. radians RNA virus | 0.8429611238455599 |
| 548 | Apple latent spherical virus | 0.8733428004594727 |

### Example 2: Verification of IRES Activity of to-be-Predicted Sequences

### 2.1 Plasmid Construction

[0150] Plasmids containing different IRES elements and coding genes eGFP were constructed, and this step was entrusted to Nanjing Genscript Biotech Corporation for gene synthesis and cloning. A DNA vector of constructed circular RNA included a T7 promoter, a 5′ homology arm (SEQ ID NO: 558), a 3′ intron (SEQ ID NO: 557), a second exon E2 (SEQ ID NO: 555), a 5′ spacer region (SEQ ID NO: 549), an IRES element, an eGFP protein coding region sequence, a 3′ spacer region (SEQ ID NO: 551), a first exon E1 (SEQ ID NO: 554), a 5′ intron (SEQ ID NO: 556), a 3′ homology arm (SEQ ID NO: 560), and a restriction site XbaI that can be used for plasmid linearization. The obtained gene fragment was connected to a pUC57 vector.

### 2.2 Preparation of Linear Plasmid Template

### 2.2.1 Plasmid Extraction

[0151] (1) Stab culture bacteria synthesized in vitro were activated under 37° C. at 220 rpm for 3 to 4 hours.
(2) An activated bacterial solution was taken for amplification culture under a culture condition of 37° C. at 220 rpm overnight.
(3) A plasmid was extracted (a Tiangen endotoxin-free small amount Midiprep Kit), and an OD value was measured.

### 2.2.2 Plasmid Digestion

[0152] The plasmid prepared in the foregoing step 2.2.1 was digested with a XbaI single digestion.

### Enzyme Digestion System:

TABLE 6

| Reagent | Volume | |
|---|---|---|
| Plasmid | 10 | μg |
| XbaI restriction endonuclease | 5 | μL |
| 10 × cutsmart buffer | 30 | μL |
| Nuclease free water | Total 300 | μL |

[0154] Enzyme digestion was conducted at 37° C. overnight. A universal DNA gel extraction kit (Tiangen Biotech (Beijing) Co., Ltd.) was used to recover an enzyme-digested product, the OD value was measured, and the enzyme-digested product was identified via 1% agarose gel electrophoresis. A purified linear plasmid template was used for in vitro transcription.

2.2.3 Preparation of mRNA Via In Vitro Transcription
2.2.3.1 Preparation of Circular mRNA Via One-Step Transcription and Cyclization
1) An in vitro transcription reaction was conducted, and the system was as follows:

TABLE 7

| Reagent | Volume | |
|---|---|---|
| 10 × Reaction buffer | 2 | μL |
| ATP (20 mM) | 2 | μL |
| CTP (20 mM) | 2 | μL |
| UTP (20 mM) | 2 | μL |
| GTP (20 mM) | 2 | μL |
| Linearized DNA template | 600 | ng |
| Pyrophosphatase | | μL |
| RNase inhibitor | 2 | μL |
| T7 RNA Polymerase | 2 | μL |
| RNA Nuclease free Water | Total 20 | μL |

[0155] Incubation was carried out at 37° C. for 2 to 4 hours, 2 μL of DNaseI was added for digestion at 37° C. for 15 minutes.

2) Purification of transcript mRNA

[0156] The foregoing obtained transcript was purified via a silica spin column method (Thermo, GeneJET RNA Purification Kit), and the OD value was measured and 1% denatured agarose gel electrophoresis was used to identify an RNA size (FIG. 1 to FIG. 3). Figures of denatured agarose gel electrophoresis shown in FIG. 1 to FIG. 3 revealed that the linear mRNA and the circular RNA were successfully synthesized, and the mRNA in the cyclization treatment group migrated faster on the gel than the linear mRNA, and the band was cyclized completely.

[0157] 2.2.4 Transfection of 293T Cells with Circular mRNA Encoding EGFP and Measurement of Fluorescence Intensity

2.2.4.1 Cell culture: 293T cells were inoculated in a DMEM high-glucose medium containing 10% fetal bovine serum and 1% double antibody, and incubated at 37° C. in a 5% CO₂ incubator. Subculture of cells was carried out every other 2-3 days.
2.2.4.2 Cell transfection: before transfection, the 293T cells were seeded in a 24-well plate at 1×10⁵ cells/well, and incubated at 37° C. in a 5% CO₂ incubator. After a confluence of the cells reached 70% to 90%, a transfection reagent Lipofectamine Messenger Max (Invitrogen) was used to transfect the 293T cells at 500 ng of mRNA per well. Detailed operations were as follows:

### 1) Dilution of Messenger MAX™ Reagent

TABLE 8

| Reagent | Volume/well |
|---|---|
| MEM serum-free medium | 25 μL |
| Messenger MAX ™ Reagent | 0.75 μL |

[0159] Incubation was carried out by standing at room temperature for 10 minutes after dilution and mixing.

2) Dilution of mRNA

TABLE 9

| Reagent | Volume/well | |
|---|---|---|
| mRNA | 500 | ng |
| MEM serum-free medium | made up to 25 | μL |

3) Selection of Mixed and Diluted Messenger MAX™ Reagent and mRNA (1:1)

TABLE 10

| Reagent | Volume/well |
|---|---|
| Diluted Messenger MAX ™ Reagent | 25 μL |
| Diluted mRNA | 25 μL |

[0160] Incubation was carried out by standing at room temperature for 5 minutes after dilution and mixing.

4) 50 μL of the above mixed solution was sucked and slowly added to the 24-well plate in an adherent manner, and incubation was carried out at 37° C. in the 5% CO₂ incubator.

### 2.2.4.3 Test of Protein Expression

[0161] 1) Cell fluorescence observation: expression of EGFP was observed in the 293T cells 24 hours after transfection under a fluorescence microscope.
2) Test of average fluorescence intensity of cells via flow cytometry: the average fluorescence intensity of the 293T cells were measured by using a flow cytometer 24 hours after transfection.

### 2.2.5 Analysis of Test Results

[0162] No active IRES sequence was added to the circular mRNA molecule in the control 1, and a coxsackievirus B3 (CVB3) sequence (SEQ ID NO: 562) with high IRES activity was added to the circular mRNA molecule in the control 2. The test results are shown in the table below. If the expression level of EGFP was greater than 0 and less than or equal to 10000, it indicated that the to-be-predicted sequence mediated the expression of the circular RNA, and contained the IRES sequence; if the expression level of EGFP is greater than 10000, it indicated that the IRES contained in the to-be-predicted sequence had extremely good activity.

TABLE 11

| | eGFP |
|---|---|
| SEQ ID | expression |
| NO: | level |
| Control 1 | 0 |
| 1 | 29221 |
| 2 | 17075 |
| 3 | 29269 |
| 4 | 20991 |
| 5 | 12371 |
| 6 | 9263 |
| 7 | 10301 |
| 8 | 11887 |
| 9 | 14138 |
| 10 | 25237 |
| 11 | 35087 |
| 12 | 7557 |
| 13 | 29810 |
| 14 | 26472 |
| 15 | 22694 |
| 16 | 12621 |
| 17 | 31332 |
| 18 | 22290 |
| 19 | 23429 |
| 20 | 25904 |
| 21 | 887 |
| 22 | 12438 |
| 23 | 728 |
| 24 | 3451 |
| 25 | 23699 |
| 26 | 25696 |
| 27 | 32602 |
| 28 | 23039 |
| 29 | 399 |
| 30 | 343 |
| 31 | 354 |
| 32 | 8365 |
| 33 | 11190 |
| 34 | 10725 |
| 35 | 10890 |
| 36 | 11818 |
| 37 | 10761 |
| 38 | 7885 |
| 39 | 10150 |
| 40 | 322 |
| 41 | 13604 |
| 42 | 13239 |
| 43 | 12396 |
| 44 | 11558 |
| 45 | 20827 |
| 46 | 29790 |
| 47 | 12569 |
| 48 | 11001 |
| 49 | 7534 |
| 50 | 9704 |
| 51 | 13760 |
| 52 | 11911 |
| 53 | 12251 |
| 54 | 9974 |
| 55 | 10235 |
| 56 | 14185 |
| 57 | 12646 |
| 58 | 3452 |
| 59 | 21316 |
| 60 | 3421 |
| 61 | 400 |
| 62 | 10943 |
| 63 | 10299 |
| 64 | 10455 |
| 65 | 7979 |
| 66 | 11583 |
| 67 | 9016 |
| 68 | 281 |
| 69 | 6117 |
| 70 | 1456 |
| 71 | 9746 |
| 72 | 13013 |
| 73 | 278 |
| 74 | 7892 |
| 75 | 5470 |
| 76 | 7721 |
| 77 | 841 |
| 78 | 8171 |
| 79 | 19209 |
| 80 | 310 |
| 81 | 4328 |
| 82 | 5306 |
| 83 | 5055 |
| 84 | 8931 |
| 85 | 7222 |
| 86 | 5289 |
| 87 | 6324 |
| 88 | 5609 |
| 89 | 6388 |
| 90 | 1975 |
| 91 | 23641 |
| 92 | 6765 |
| 93 | 8276 |
| 94 | 9418 |
| 95 | 9018 |
| 96 | 481 |
| 97 | 7920 |
| 98 | 24446 |
| 99 | 8317 |
| 100 | 1256 |
| 101 | 24473 |
| 102 | 4762 |
| 103 | 5051 |
| 104 | 25717 |
| 105 | 6133 |
| 106 | 15307 |
| 107 | 14202 |
| 108 | 2235 |
| 109 | 370 |
| 110 | 24772 |
| 111 | 281 |
| 112 | 6786 |
| 113 | 2127 |
| 114 | 593 |
| 115 | 17246 |
| 116 | 20619 |
| 117 | 18487 |
| 118 | 14381 |
| 119 | 19184 |
| 120 | 7689 |
| 121 | 3438 |
| 122 | 14187 |
| 123 | 19131 |
| 124 | 2367 |
| 125 | 21467 |
| 126 | 285 |
| 127 | 27497 |
| 128 | 4110 |
| 129 | 20264 |
| 130 | 16132 |
| 131 | 5910 |
| 132 | 9565 |
| 133 | 3980 |
| 134 | 394 |
| 135 | 21244 |
| 136 | 2891 |
| 137 | 315 |
| 138 | 9187 |
| 139 | 15590 |
| 140 | 601 |
| 141 | 6431 |
| 142 | 12100 |
| 143 | 5926 |
| 144 | 9023 |
| 145 | 6053 |
| 146 | 5527 |
| 147 | 6638 |
| 148 | 9410 |
| 149 | 4890 |
| 150 | 5021 |
| 151 | 2678 |
| 152 | 8172 |
| 153 | 6613 |
| 154 | 4961 |
| 155 | 5161 |
| 156 | 8514 |
| 157 | 349 |
| 158 | 8106 |
| 159 | 11662 |
| 160 | 4213 |
| 161 | 7910 |
| 162 | 11675 |
| 163 | 280 |
| 164 | 7944 |
| 165 | 19436 |
| 166 | 11313 |
| 167 | 11189 |
| 168 | 12517 |
| 169 | 11698 |
| 170 | 9133 |
| 171 | 7366 |
| 172 | 11427 |
| 173 | 11991 |
| 174 | 1789 |
| 175 | 2368 |
| 176 | 5525 |
| 177 | 3356 |
| 178 | 4578 |
| 179 | 17780 |
| 180 | 15827 |
| 181 | 7890 |
| 182 | 12115 |
| 183 | 15495 |
| 184 | 11875 |
| 185 | 1235 |
| 186 | 13625 |
| 187 | 4356 |
| 188 | 13462 |
| 189 | 10415 |
| 190 | 6798 |
| 191 | 7508 |
| 192 | 9261 |
| 193 | 8485 |
| 194 | 6625 |
| 195 | 6051 |
| 196 | 8719 |
| 197 | 6394 |
| 198 | 20029 |
| 199 | 10627 |
| 200 | 22761 |
| 201 | 10673 |
| 202 | 5240 |
| 203 | 4538 |
| 204 | 6008 |
| 205 | 7355 |
| 206 | 5444 |
| 207 | 5808 |
| 208 | 8509 |
| 209 | 4643 |
| 210 | 7374 |
| 211 | 4270 |
| 212 | 4949 |
| 213 | 4379 |
| 214 | 7689 |
| 215 | 21144 |
| 216 | 27823 |
| 217 | 24799 |
| 218 | 21715 |
| 219 | 20302 |
| 220 | 22281 |
| 221 | 18407 |
| 222 | 25004 |
| 223 | 30001 |
| 224 | 3219 |
| 225 | 26036 |
| 226 | 5430 |
| 227 | 26036 |
| 228 | 26016 |
| 229 | 26089 |
| 230 | 25480 |
| 231 | 26082 |
| 232 | 28353 |
| 233 | 20880 |
| 234 | 27128 |
| 235 | 22492 |
| 236 | 16527 |
| 237 | 3345 |
| 238 | 1242 |
| 239 | 27797 |
| 240 | 14851 |
| 241 | 4378 |
| 242 | 17024 |
| 243 | 24485 |
| 244 | 25463 |
| 245 | 17626 |
| 246 | 25950 |
| 247 | 17476 |
| 248 | 41579 |
| 249 | 47535 |
| 250 | 30143 |
| 251 | 33693 |
| 252 | 36779 |
| 253 | 43377 |
| 254 | 41163 |
| 255 | 26784 |
| 256 | 20119 |
| 257 | 36914 |
| 258 | 39011 |
| 259 | 5627 |
| 260 | 8917 |
| 261 | 24495 |
| 262 | 39506 |
| 263 | 38283 |
| 264 | 38788 |
| 265 | 41324 |
| 266 | 34856 |
| 267 | 39125 |
| 268 | 42832 |
| 269 | 36835 |
| 270 | 35262 |
| 271 | 4517 |
| 272 | 25974 |
| 273 | 17804 |
| 274 | 19160 |
| 275 | 22032 |
| 276 | 21567 |
| 277 | 8337 |
| 278 | 21532 |
| 279 | 20713 |
| 280 | 23898 |
| 281 | 21122 |
| 282 | 20382 |
| 283 | 18398 |
| 284 | 22921 |
| 285 | 22987 |
| 286 | 17122 |
| 287 | 17989 |
| 288 | 11270 |
| 289 | 16458 |
| 290 | 8700 |
| 291 | 23033 |
| 292 | 12443 |
| 293 | 21616 |
| 294 | 22761 |
| 295 | 7891 |
| 296 | 45345 |
| 297 | 3891 |
| 298 | 34488 |
| 299 | 9871 |
| 300 | 511 |
| 301 | 36127 |
| 302 | 27811 |
| 303 | 24601 |
| 304 | 25929 |
| 305 | 34899 |
| 306 | 31458 |
| 307 | 32755 |
| 308 | 33312 |
| 309 | 18319 |
| 310 | 13233 |
| 311 | 14579 |
| 312 | 24613 |
| 313 | 4040 |
| 314 | 25067 |
| 315 | 22954 |
| 316 | 7653 |
| 317 | 21439 |
| 318 | 21495 |
| 319 | 20583 |
| 320 | 9556 |
| 321 | 17712 |
| 322 | 14206 |
| 323 | 20070 |
| 324 | 25019 |
| 325 | 3312 |
| 326 | 17706 |
| 327 | 12655 |
| 328 | 726 |
| 329 | 13420 |
| 330 | 884 |
| 331 | 25557 |
| 332 | 16937 |
| 333 | 16868 |
| 334 | 21053 |
| 335 | 15213 |
| 336 | 27120 |
| 337 | 6088 |
| 338 | 4579 |
| 339 | 5801 |
| 340 | 11110 |
| 341 | 2317 |
| 342 | 8965 |
| 343 | 6543 |
| 344 | 9947 |
| 345 | 6014 |
| 346 | 7891 |
| 347 | 4497 |
| 348 | 14524 |
| 349 | 5541 |
| 350 | 5020 |
| 351 | 5561 |
| 352 | 5504 |
| 353 | 6781 |
| 354 | 11487 |
| 355 | 6747 |
| 356 | 7981 |
| 357 | 4292 |
| 358 | 2451 |
| 359 | 1677 |
| 360 | 4517 |
| 361 | 5023 |
| 362 | 9642 |
| 363 | 7575 |
| 364 | 6718 |
| 365 | 11587 |
| 366 | 9871 |
| 367 | 5670 |
| 368 | 5435 |
| 369 | 9277 |
| 370 | 8262 |
| 371 | 7612 |
| 372 | 6362 |
| 373 | 9639 |
| 374 | 1582 |
| 375 | 3365 |
| 376 | 8912 |
| 377 | 7983 |
| 378 | 3850 |
| 379 | 9871 |
| 380 | 6694 |
| 381 | 7829 |
| 382 | 10159 |
| 383 | 10299 |
| 384 | 7369 |
| 385 | 21244 |
| 386 | 2641 |
| 387 | 13758 |
| 388 | 10082 |
| 389 | 13306 |
| 390 | 8735 |
| 391 | 12278 |
| 392 | 14340 |
| 393 | 15015 |
| 394 | 18180 |
| 395 | 12864 |
| 396 | 9541 |
| 397 | 6549 |
| 398 | 10594 |
| 399 | 12189 |
| 400 | 9871 |
| 401 | 8324 |
| 402 | 9651 |
| 403 | 10626 |
| 404 | 9490 |
| 405 | 9014 |
| 406 | 14962 |
| 407 | 898 |
| 408 | 845 |
| 409 | 8910 |
| 410 | 771 |
| 411 | 1071 |
| 412 | 561 |
| 413 | 355 |
| 414 | 840 |
| 415 | 720 |
| 416 | 329 |
| 417 | 1272 |
| 418 | 1043 |
| 419 | 736 |
| 420 | 506 |
| 421 | 1019 |
| 422 | 6791 |
| 423 | 1505 |
| 424 | 1111 |
| 425 | 511 |
| 426 | 381 |
| 427 | 436 |
| 428 | 345 |
| 429 | 931 |
| 430 | 591 |
| 431 | 7789 |
| 432 | 6651 |
| 433 | 703 |
| 434 | 5589 |
| 435 | 478 |
| 436 | 17046 |
| 437 | 349 |
| 438 | 13995 |
| 439 | 17677 |
| 440 | 11416 |
| 441 | 18705 |
| 442 | 7761 |
| 443 | 355 |
| 444 | 9489 |
| 445 | 24062 |
| 446 | 5561 |
| 447 | 4798 |
| 448 | 2289 |
| 449 | 622 |
| 450 | 9617 |
| 451 | 2391 |
| 452 | 5581 |
| 453 | 7819 |
| 454 | 8910 |
| 455 | 6719 |
| 456 | 1375 |
| 457 | 14380 |
| 458 | 8024 |
| 459 | 7045 |
| 460 | 13124 |
| 461 | 706 |
| 462 | 2144 |
| 463 | 4141 |
| 464 | 868 |
| 465 | 553 |
| 466 | 9810 |
| 467 | 325 |
| 468 | 354 |
| 469 | 308 |
| 470 | 651 |
| 471 | 9810 |
| 472 | 5561 |
| 473 | 8771 |
| 474 | 2718 |
| 475 | 1981 |
| 476 | 2718 |
| 477 | 845 |
| 478 | 2371 |
| 479 | 2718 |
| 480 | 819 |
| 481 | 3231 |
| 482 | 2718 |
| 483 | 327 |
| 484 | 399 |
| 485 | 579 |
| 486 | 2585 |
| 487 | 7819 |
| 488 | 4830 |
| 489 | 5247 |
| 490 | 2695 |
| 491 | 1221 |
| 492 | 2819 |
| 493 | 292 |
| 494 | 10472 |
| 495 | 343 |
| 496 | 20591 |
| 497 | 1819 |
| 498 | 8838 |
| 499 | 11717 |
| 500 | 8460 |
| 501 | 8910 |
| 502 | 2359 |
| 503 | 11024 |
| 504 | 13799 |
| 505 | 12515 |
| 506 | 11636 |
| 507 | 14272 |
| 508 | 2670 |
| 509 | 13921 |
| 510 | 719 |
| 511 | 12724 |
| 512 | 879 |
| 513 | 6719 |
| 514 | 15459 |
| 515 | 2376 |
| 516 | 12313 |
| 517 | 2367 |
| 518 | 3121 |
| 519 | 287 |
| 520 | 4214 |
| 521 | 836 |
| 522 | 4567 |
| 523 | 6741 |
| 524 | 4321 |
| 525 | 4521 |
| 526 | 2513 |
| 527 | 3421 |
| 528 | 10198 |
| 529 | 303 |
| 530 | 406 |
| 531 | 6521 |
| 532 | 343 |
| 533 | 320 |
| 534 | 24948 |
| 535 | 2231 |
| 536 | 3952 |
| 537 | 446 |
| 538 | 338 |
| 539 | 307 |
| 540 | 3410 |
| 541 | 371 |
| 542 | 314 |
| 543 | 306 |
| 544 | 274 |
| 545 | 3421 |
| 546 | 363 |
| 547 | 351 |
| 548 | 307 |
| Control 2 | 12692 |

[0163] It could be learned from the above Table 11 that the polynucleotides of the sequences shown in the SEQ ID NOs: 1 to 548 in the disclosure all had the activity of initiating protein translation of the circular mRNA molecule, and could be used as the IRES element to construct a circular mRNA molecule having protein and polypeptide translation activity. In some preferred embodiments, the EGFP expression level of the circular mRNA molecules constructed by using the polynucleotide in the disclosure was higher than that of the circular nucleic acid molecule constructed by using Coxsackievirus B3 (CVB3) (shown in SEQ ID NO: 562), indicating that the IRES activity of the polynucleotide provided by the disclosure was further improved compared with the current highly-active IRES sequence, which was of great significance for improving the levels of expressing the protein of interest and the polypeptide of interest by the circular nucleic acid molecule.

[0164] All technical features disclosed in this specification can be combined in any manner. Each feature disclosed in this specification may also be replaced with other features having the same, equivalent or similar function. Therefore, unless otherwise specified, each disclosed feature is only an instance of a series of equivalent or similar features.

[0165] In addition, from the foregoing descriptions, a person skilled in the art can easily learn a key feature of the present invention, and can make many modifications to the invention to adapt to various use purposes and conditions without departing from the spirit and scope of the present invention. Therefore, such modifications are also intended to fall within the scope of the appended claims.

1. A Levenshtein distance-based internal ribosome entry site (IRES) screening method, comprising the following steps:
(1) selecting n sequences comprising an IRES as sample sequences, wherein n≥1 and n is a natural number;
(2) subjecting the sample sequences and to-be-predicted sequences to one-hot encoding respectively, wherein categorical variables are A, T, C, and G;
(3) traversing the sample sequences, and calculating a Levenshtein distance between each sample sequence and the to-be-predicted sequence;
(4) calculating an average of Levenshtein distances between all sample sequences and the to-be-predicted sequences; and
(5) determining, based on the average, whether the to-be-predicted sequences comprise the IRES.

2. The Levenshtein distance-based IRES screening method according to claim 1, wherein in the step (5), if the average is not less than a set prediction threshold, it is determined that the to-be-predicted sequence comprises the IRES, otherwise it is determined that the to-be-predicted sequence comprises no IRES.

3. The Levenshtein distance-based IRES screening method according to claim 2, wherein the prediction threshold is not less than 0.5, and optionally, the prediction threshold is 0.75.

4. The Levenshtein distance-based IRES screening method according to claim 1, wherein the method further comprises the following step: subjecting a to-be-predicted sequence determined to comprise the IRES to experimental verification to verify the IRES activity of the to-be-predicted sequence.

5. The Levenshtein distance-based IRES screening method according to claim 4, wherein the experimental verification comprises the steps of:
constructing a circular nucleic acid molecule by using the to-be-predicted sequence determined to comprise the IRES, wherein in the circular nucleic acid molecule, the to-be-predicted sequence is operably linked to a nucleotide sequence encoding a fluorescent protein; and
obtaining a fluorescence signal released by the circular nucleic acid molecule, and determining the IRES activity of the to-be-predicted sequence based on the fluorescence signal.

6. A polynucleotide, wherein the polynucleotide is selected from at least one of the group consisting of (i) to (iv):
(i) comprising a nucleotide sequence shown in any one of SEQ ID NOs: 1, 2, 3, 4, 9, 10, 11, 13, 14, 15, 17, 18, 19, 20, 25, 26, 27, 28, 41, 42, 45, 46, 51, 56, 59, 72, 79, 91, 98, 101, 104, 106, 107, 110, 115, 116, 117, 118, 119, 122, 123, 125, 127, 129, 130, 135, 139, 165, 179, 180, 183, 186, 188, 198, 200, 215, 216, 217, 218, 219, 220, 221, 222, 223, 225, 227, 228, 229, 230, 231, 232, 233, 234, 235, 236, 239, 240, 242, 243, 244, 245, 246, 247, 248, 249, 250, 251, 252, 253, 254, 255, 256, 257, 258, 261, 262, 263, 264, 265, 266, 267, 268, 269, 270, 272, 273, 274, 275, 276, 278, 279, 280, 281, 282, 283, 284, 285, 286, 287, 289, 291, 293, 294, 296, 298, 301, 302, 303, 304, 305, 306, 307, 308, 309, 310, 311, 312, 314, 315, 317, 318, 319, 321, 322, 323, 324, 326, 329, 331, 332, 333, 334, 335, 336, 348, 385, 387, 389, 392, 393, 394, 395, 406, 436, 438, 439, 441, 445, 457, 460, 496, 504, 507, 509, 511, 514, and 534;
(ii) a mutant sequence of any one nucleotide sequence shown in (i), wherein the mutant sequence has a mutant nucleotide at one or more positions of any corresponding nucleotide sequence shown in (i), and the mutant sequence has an activity of initiating translation of a circular nucleic acid molecule;
(iii) a nucleotide sequence that can be reversely complementary to a hybridized sequence of the nucleotide sequence shown in (i) or (ii) under a highly stringent hybridization condition or a very highly stringent hybridization condition and that has an activity of initiating translation of a circular nucleic acid molecule; and
(iv) a nucleotide sequence having at least 70%, optionally at least 80%, preferably at least 90%, more preferably at least 95%, most preferably at least 98% sequence identity with the nucleotide sequence shown in any one of (i) or (ii) and having an activity of initiating translation of a circular nucleic acid molecule.

7. The polynucleotide according to claim 6, wherein the polynucleotide is a polynucleotide comprising an IRES that is screened by a Levenshtein distance-based IRES screening method, the method comprising the following steps:
(1) selecting n sequences comprising an IRES as sample sequences, wherein n≥1 and n is a natural number;
(2) subjecting the sample sequences and to-be-predicted sequences to one-hot encoding respectively, wherein categorical variables are A, T, C, and G;
(3) traversing the sample sequences, and calculating a Levenshtein distance between each sample sequence and the to-be-predicted sequence;
(4) calculating an average of Levenshtein distances between all sample sequences and the to-be-predicted sequences; and
(5) determining, based on the average, whether the to-be-predicted sequences comprise the IRES.

8. A circular nucleic acid molecule, wherein the circular nucleic acid molecule comprises the polynucleotide according to claim 6;
preferably, the circular nucleic acid molecule further comprises a coding region encoding a polypeptide of interest, and the coding region is operably linked to the polynucleotide; and
optionally, the circular nucleic acid molecule further comprises one or more of the following elements: a 5′ spacer region, a 3′ spacer region, a second exon, and a first exon.

9. A cyclization precursor nucleic acid molecule, wherein the cyclization precursor nucleic acid molecule is cyclized to form the circular nucleic acid molecule according to claim 8; and
optionally, the cyclization precursor nucleic acid molecule further comprises one or more of the following elements:
a 5′ homology arm, a 3′ intron, a second exon, a 5′ spacer region, a coding region, a 3′ spacer region, a first exon, a 5′ intron and a 3′ homology arm.

10. A recombinant nucleic acid molecule, wherein the recombinant nucleic acid molecule is (f₁):
(f₁) comprising the polynucleotide according to claim 6.

11. A recombinant nucleic acid molecule, wherein the recombinant nucleic acid molecule is (f₂):
(f₂) transcription to form the cyclization precursor nucleic acid molecule according to claim 9.

12. A recombinant expression vector, wherein the recombinant expression vector comprises the recombinant nucleic acid molecule according to claim 10.

13. A recombinant expression vector, wherein the recombinant expression vector comprises the recombinant nucleic acid molecule according to claim 11.

14. A recombinant host cell, wherein the recombinant host cell comprises the polynucleotide according to claim 6.

15. A method for preparing a circular nucleic acid molecule with an improved protein expression level, wherein the method comprises a step of operably linking the polynucleotide according to claim 6 to a coding region of the circular nucleic acid molecule.

16. A method for initiating translation of a circular nucleic acid molecule, wherein the method comprises utilizing the polynucleotide according to claim 6.

17. A method for increasing a protein expression level of a circular nucleic acid molecule, wherein the method comprises utilizing the polynucleotide according to claim 6.

18. A method for expressing a protein or a polypeptide, wherein the method comprises utilizing the circular nucleic acid molecule according to claim 8, optionally, the protein or the polypeptide is one or more selected from: an antigen, an antibody, an antigen-binding fragment, a channel protein, a receptor, a cytokine, and an immune checkpoint inhibitor.

19. A method for expressing a protein or a polypeptide, wherein the method comprises utilizing the cyclization precursor nucleic acid molecule according to claim 9, optionally, the protein or the polypeptide is one or more selected from: an antigen, an antibody, an antigen-binding fragment, a channel protein, a receptor, a cytokine, and an immune checkpoint inhibitor.

20. A method for expressing a protein or a polypeptide, wherein the method comprises the recombinant nucleic acid molecule according to claim 10, optionally, the protein or the polypeptide is one or more selected from: an antigen, an antibody, an antigen-binding fragment, a channel protein, a receptor, a cytokine, and an immune checkpoint inhibitor.

The application's sequence listing, which the Patent Office published only in electronic form, follows.

SEQUENCE LISTING (564 sequences)

SEQ ID NO: 1 - DNA, 743 bp, Echovirus E1
  source 1..743: mol_type = genomic DNA; strain = Farouk / ATCC VR-1038
ttaaaacagcctgtgggttgttcccacccacagggcccactgggcgttagcacactggtatcacggtacctttgtgcgcctgttttatactcccccccctaaggaaactttagaagcaaagcaattgtgatcaatagtgggtatggcacaccagtcatatcttgatcaagcacttctgttcccccggacttagtaccaatagactgctcaagcggttgaaggggaaaacgttcgttatccggccaactacttcgagaaacctagtagcaccatgaaagttgcggagtgtttcgctcagcacttcccccgtgtagatcaggctgatgagtcaccgtattccccacgggcgaccgtgacggtggctgcgttggcggcctgcccatggggtaacccatgggacgctctaaaacagacacggtgcgaagagtctattgagctagttggtagtcctccggcccctgaatgcggccaatcctaactgcggagcacatactcccaatccagggagcagtgtgtcgtaatgggtaactctgcagcggaaccgactactttgggtgtccgtgtttccttttattctcacattgactgcttatggtgacaattgaaagattgttaccatatagctattggattggtcatccggtgagcaatagagctattgtttatcaatttgttggatttgtaccactcaacttttctgttttgagaacactcaactacatcttactgctaaacacatcaaa

SEQ ID NO: 2 - DNA, 697 bp, Echovirus E2
  source 1..697: mol_type = genomic DNA; strain = strain USA/2013-19511
ctagcactccggtattgcggtacccttgtgcgcctgttttatcctccctccccctaacgtaatttagaagcaagactttaacggtcattaggtggctcagcacaccagccgagtcaagaccaagcacttctgttaccccggactgagtatcaataagctgctcacgtggctgaaagagaaaacgttcgttacccggccaattacttcgagaaacctagtaccaccatggaggttgcgcagcgtttcgctccgcactaccccagtgtagatcaggtcgatgagtcaccgcattccccacgggcgaccgtggcggtggctgcgttggcggcctgcccatggggaaacctatgggacgcttcaatactgacatggtgtgaagagtctattgagctaattggtaatcctccggcccctgaatgcggctaatcctaactgcggagcagacacccacaagccagtgagcagtctgtcgtaacgggcaactctgcagcggaaccgactactttgggtgtccgtgtttccttttattccattactggctgcttatggtgacaattgagagattgttaccatatagctattggattggccatccggtgagcaacagagcacttatatatctctttgttggattcataccactagacaccaggagttttacgtctttggtttatattttaaggttgaacacagcaaa

SEQ ID NO: 3 - DNA, 743 bp, Echovirus E3
  source 1..743: isolate = JSev001; mol_type = genomic DNA
ttaaaacagcctgtgggttgtacccacccacagggcccactgggcgccagcactctggtattacggtacccttgtgcgcctgttttatatcccttccccaaggtaaacgttagaagcaatgcactcccgatcaatagaaggtgcgacgcgccagtcgtatctcgatcaagcacttctgtttccccggaccgagtatcaatagactgctagcgcggttgaaggagaaaacgttcgttacccgactaactacttcgagaagcccagtagcgccatgaaagttgcagagtgtttcgctcagcacttcccccgtgtagatcaggccgatgagtcaccgcaatccccacgggcgaccgtggcggtggctgcgttggcggcctgcctatggggaaacccataggacgctcaaatacagacatggtgcgaagagtctattgagctagttagtactcctccggcccctgaatgcggctaatcctaactgcggagcaagtactcacaatccagtgggcagcttgtcgtaacgggtaactctgcagcggaaccgactactttgggtgtccgtgtttccttttattcctacattggctgcttatggtgacaatcaaagagttgttaccatatagctattggattggccatccggtgactaataaagcaattatatttctttttgttgggtttgtaccccttaatacaaccagcttcaccaccttgtgttacatcattagactgaacaaggcaaa

SEQ ID NO: 4 - DNA, 740 bp, Echovirus E3
  source 1..740: mol_type = genomic DNA; strain = 61246-70294
aaacagcctgtgggttgttcccacccacagggcccactgggcgctagcactctggtatcatggtacctttgtgcgcctgttttatccaccctccccaaaatgcaacttagaagcataatccaaacggtcattaggtagctcagtacaccaactgagcccagaccaagcacttctgtcaccccggaccgagtatcaataggctgctcgcgcggctgaaggagaaaacgttcgttatccggccaattacttcgagaaacccagtaccactatgaaagttgcgcagcgtttcgttccgcacaaccccagtgtagatcaggtcgatgagtcaccgcgttccccacgggcgaccgtggcggtggctgcgttggcggcctgcccatggggcaacctatgggacgcttcaatactgacatggtgtgaagagtctattgagctaattggtagtcctccggcccctgaatgcggctaatcctaactgcggagcagatgctcacaaaccagtgggcagtctgtcgtaatgggtaactctgcagcggaaccgactactttgggtgtccgtgtttcctttcatttttacactggctgcttatggtgacaattgagagattgttaccatatagctattggattggccatccggtgactaacagagcaattgtttacctatttattggttttgtaccgttagattacaaagttctaaagactctgaatcttattatagcactcaatacagtaaa

SEQ ID NO: 5 - DNA, 723 bp, Echovirus E3
  source 1..723: mol_type = genomic DNA; strain = 61247-622
ttcccacccacagggcccactgggcgctagcactctggtatcatggtacctttgtgcgcctgttttatccaccctccccaaaatgcaacttagaagcataatccaagcggtcattaggtagctcagtacaccaactgagcccagaccaagcacttctgtcaccccggaccgagtatcaataggctgctcgcgcggctgaaggagaaaacgttcgttatccggccaattacttcgagaaacccagtaccactatgaaagttgcgcagcgtttcgttccgcacaaccccagtgtagatcaggtcgatgagtcaccgcgttccccacgggcgaccgtggcggtggctgcgttggcggcctgcccatggggcaacctatgggacgcttcaatactgacatggtgtgaagagtctattgagctaattggtagtcctccggcccctgaatgcggctaatcctaactgcggagcagatgctcacaaaccagtgggcagtctgtcgtaatgggtaactctgcagcggaaccgactactttgggtgtccgtgtttccttttatttttacactggctgcttatggtgacaattgagagattgttaccatatagctattggattggccatccggtgactaacagagcaattgtttacctatttattggttttgtaccgttagattacaaagttctaaagactctgaatcttattatagcactcaatacagtaaa

SEQ ID NO: 6 - DNA, 730 bp, Echovirus E3
  source 1..730: mol_type = genomic DNA; strain = 61245-2710
tgggttgttcccacccacagggcccactgggcgctagcactctggtatcatggtacctttgtgcgcctgttttatccaccctccccaaaatgcaacttagaagcataatccaaacggtcattaggtagctcagtacaccaactgagcccagaccaagcacttctgtcaccccggaccgagtatcaataggctgctcgcgcggctgaaggagaaaacgttcgttatccggccaattacttcgagaaacccagtaccactatgaaagttgcgcagcgtttcgttccgcacaaccccagtgtagatcaggtcgatgagtcaccgcgttccccacgggcgaccgtggcggtggctgcgttggcggcctgcccatggggcaacccatgggacgcttcaatactgacatggtgtgaagagtctattgagctaattggtagtcctccggcccctgaatgcggctaatcctaactgcggagcagatgctcacaaaccagtgggcagtctgtcgtaatgggtaactctgcagcggaaccgactactttgggtgtccgtgtttcctttcatttttacactggctgcttatggtgacaattgagagattgttaccatatagctattggattggccatccggtgactaacagagcaattgtttacctatttattggttttgtaccgttagattacaaagttctaaagactctgaatcttattatagcactcaatacagtaaa

SEQ ID NO: 7 - DNA, 722 bp, Echovirus E3
  source 1..722: mol_type = genomic DNA; strain = 63038-1131
tcccacccacagggcccactgggcgctagcactctggtatcatggtacctttgtgcgcctgttttatccaccctccccaaaatgcaacttagaagcataatccaaacggtcattaggtagctcagtacaccaactgagcccagaccaagcacttctgtcaccccggaccgagtatcaataggctgctcgcgcggctgaaggagaaaacgttcgttatccggccaattacttcgagaaacccagtaccactatgaaagttgcgcagcgtttcgttccgcacaaccccagtgtagatcaggtcgatgagtcaccgcgttccccacgggcgaccgtggcggtggctgcgttggcggcctgcccatggggcaacccatgggacgcttcaatactgacatggtgtgaagagtctattgagctaattggtagtcctccggcccctgaatgcggctaatcctaactgcggagcagatgctcacaaaccagtgggcagtctgtcgtaatgggtaactctgcagcggaaccgactactttgggtgtccgtgtttcctttcatttttacactggctgcttatggtgacaattgagagattgttaccatatagctattggattggccatccggtgactaacagagcaattgtttacctatttattggttttgtaccgttagattacaaagttctaaagactctgaatcttattatagcactcaatacagtaaa

SEQ ID NO: 8 - DNA, 714 bp, Echovirus E3
  source 1..714: mol_type = genomic DNA; strain = 63040-70881
acagggcccactgggcgctagcactctggtatcatggtacctttgtgcgcctgttttatccaccctccccaaaatgcaacttagaagcataatccaaacggtcattaggtagctcagtacaccaactgagcccagaccaagcacttctgtcaccccggaccgagtatcaataggctgctcgcgcggctgaaggagaaaacgttcgttatccggccaattacttcgagaaacccagtaccactatgaaagttgcgcagcgtttcgttccgcacaaccccagtgtagatcaggtcgatgagtcaccgcgttccccacgggcgaccgtggcggtggctgcgttggcggcctgcccatggggcaacccatgggacgcttcaatactgacatggtgtgaagagtctattgagctaattggtagtcctccggcccctgaatgcggctaatcctaactgcggagcagatgctcacaaaccagtgggcagtctgtcgtaatgggtaactctgcagcggaaccgactactttgggtgtccgtgtttcctttcatttttacactggctgcttatggtgacaattgagagattgttaccatatagctattggattggccatccggtgactaacagagcaattgtttacctatttattggttttgtaccgttagattacaaagttctaaagactctgaatcttattatagcactcaatacagtaaa

SEQ ID NO: 9 - DNA, 682 bp, Echovirus E3
  source 1..682: isolate = HNWY-01; mol_type = genomic DNA
atcacggtacctttgtgcgcctgttttataaccctttccccaacgcaacatagaagctatacacactgatcaacagcaggcacagcgcaccagttgtgtctcgatcaagcacttctgtctccccggaccgagtatcaatagactgcttacgcggttgaaggagaaaacgttcgttacccggctgactacttcgaaaagcctagtagtgccatgaaagttgcggagcgttttgttcagcacttcccccgtgtagatcaggtcgatgagtcactgcgttccccacgggtgaccgtggcagtggctgcgttggcggcctgcccgtggggcaacccatgggacgcttcaatacaaacatggtgcgaagagtctattgagctagtcagtagtcctccggcccctgaatgcggctaatcccaactgcggagcatgcgccttcgacccagagggtagcatgtcgtaacgggcaactctgcagcggaaccgactactttgggtgtccgtgtttccttttattcttatactggctgcttatggtgacaattgagagattgttaccatatagctattggattggccatccggtgagtaatagagctattatatactcctttgtgggttttgtgccactggatcacaaggtcttgaaaactctcacttttatcacaacacttaacactgcaaa

SEQ ID NO: 10 - DNA, 744 bp, Echovirus E3
  source 1..744: isolate = ECHO3_INMI1; mol_type = genomic DNA
ttaaaacaaggctgtgggttgtacccgcccacagggcccactgggcgccagcactctggtattacggtacccttgtgcgcctgttttatatcccttccccaaggtaaacgttagaagcaatgcactcccgatcaatagaaggtgcgacgcgccagtcgtatctcgatcaagcacttctgtttccccggaccgagtatcaatagactgctagcgcggttgaaggagaaaacgttcgttacccgactaactacttcgagaagcccagtagcgccatgaaagttgcagagtgtttcgctcagcacttcccccgtgtagatcaggccgatgagtcaccgcaatccccacgggcgaccgtggcggtggctgcgttggcggcctgcctatggggaaacccataggacgctcaaatacagacatggtgcgaagagtctattgagctagttagtactcctccggcccctgaatgcggctaatcctaactgcggagcaagtactcacaatccagtgggcagcttgtcgtaacgggtaactctgcagcggaaccgactactttgggtgtccgtgtttccttttattcctacattggctgcttatggtgacaatcaaagagttgttaccatatagctattggattggccatccggtgactaataaagcaattatatttctttttgttgggtttgtaccccttaatacaaccagcttcaccacattgtgttacatcattagactgaacaaggcaaa

SEQ ID NO: 11 - DNA, 657 bp, Echovirus E3
  source 1..657: isolate = Env_2016_Sep_E-3; mol_type = genomic DNA
cacaccctccccaaagatgtaacttagaagcactttccaagtggtcattaggcagctcagcacaccagctgagtccagaccaagcacttctgttaccccggaccgagtatcaataggctgcttgcgcggctgaaagagaaaacgttcgttacccggccaattacttcgagaaacctagtaccaccatgaaagttgcgcggcgtttcgttccgcacaaccccagtgtagatcaggtcgatgagtcaccgcgttcctcacgggcgaccgtggcggtggctgcgctggcggcctgcccatgggacaacccatgggacgcttcaatgctgacatggtgtgaagagtctattgagctaattggtagtcctccggcccctgaatgcggctaatcctaactgcggagcagatacccacaaaccagtgggcagtctgtcgtaacgggtaactctgcagcggaaccgactactttgggtgtccgtgtttccttttattcatacattggctgcttatggtgacaattgagagattgttaccatatagctattggattggccatccggtgtctaacagagcaattgtatacctatttataggttttataccattgaattacaaagtcttagagactctgaatcttattataacacttaacacagcaaa

SEQ ID NO: 12 - DNA, 742 bp, Echovirus E3
  source 1..742: mol_type = genomic DNA; strain = Sakhalin-11.293
ttaaaacagctctggggttgtacccactcacagggcccactgggcgctagcacactggtatcacggtacctttgtgcgcctgttttataacccctttcccaaacgcaacgtagaagccacacacactgatcagtagtaggcacagcgcaccagttgtgtctcgatcaagcacttctgtctccccggaccgagtatcaatagactgctcacgcggttgaaggagaaaacgttcgttaaccggctgactacttcgagaaacctagtagtactatgaaagttgcgaagcgtttcactcagcacttcccccgtgtagatcaggccgatgagtcactgcgttccccacgggtgaccgtggcagtggctgcgttggcggcctgcccatggggtaacccatgggacgcttcaatacggacatggtgcgaagagtctattgagctagccagtagtcctccggcccctgaatgcggctaatcctaactgcggagcatgtgccctcgatccagagggtagcatgtcgtaacgggcaactctgcagcggaaccgactactttgggtgtccgtgtttctttttattcttatactggctgcttatggtgacaattgggagattgttaccatatagctattggattggccacccggtgactaatagagctattatctactcctttataggttttgtgccattgaactacaaggtcttaaagactctcaactttatcatcatacttaatactgcaaa

SEQ ID NO: 13 - DNA, 687 bp, Echovirus E3
  source 1..687: mol_type = genomic DNA; strain = HAI/2016-23067A
ggtatcacggtacctttgtgcgcctgttttataacccctcccccgaatgtaacgtagaagctgaacctaagtggtcaataggcggctcagaacaccatctgggtcttgaccaagcacttctgttaccccggactgagtatcaataagctgctcacgcggctgaaggagaaaacgtccgttacccggccaattacttcaagaaacccagtaccaccatgaaggttgcgcagcgtttcgctccgcacaaccccagtgtagatcaggtcgatgagtcaccgcattcctcacgggcgaccgtggcggtggctgcgctggcggcctgcccatggggcaacccatgggacgcttcaatactgacatggtgcgaagagtcaattgagctaattggtagtcctccggcccctgaatgcggctaatcctaactgcggagcagacgcccaagctccagtgggtagtctgtcgtaacgggtaactctgcagcggaaccgactactttgggtgtccgtgtttccttttattcttacattggctgcttatggtgacaattgagagattgttaccatatagctattggattggccatccggtgacaaatagagcaattgtatatctttttgttggattcataccactcggcaaaacaaatttcagaaccttgtgttatattattagattaaatacagcaaa

SEQ ID NO: 14 - DNA, 725 bp, Echovirus E3
  source 1..725: mol_type = genomic DNA; strain = HAI/2016-23066
tgttcccacccacggggcctactgggcgccagcacactggtatcacggtacctttgtgcgcctgttttataacccctcccccgaatgtaacgtagaagctgaacctaagtggtcaataggcggctcagaacaccatctgggtcttgaccaagcacttctgttaccccggactgagtatcaataagctgctcacgcggctgaaggagaaaacgtccgttacccggccaattacttcaagaaacccagtaccaccatgaaggttgcgcagcgtttcgctccgcacaaccccagtgtagatcaggtcgatgagtcaccgcattcctcacgggcgaccgtggcggtggctgcgctggcggcctgcccatggggcaacccatgggacgcttcaatactgacatggtgcgaagagtcaattgagctaattggtagtcctccggcccctgaatgcggctaatcctaactgcggagcagacgcccaagctccagtgggtagtctgtcgtaacgggtaactctgcagcggaaccgactactttgggtgtccgtgtttccttttattcttacattggctgcttatggtgacaattgagagattgttaccatatagctattggattggccatccggtgacaaatagagcaattgtatatctttttgttggattcataccactcggcaaaacaaatttcagaaccttgtgttatattattagattaaatacagcaaa

SEQ ID NO: 15 - DNA, 721 bp, Echovirus E3
  source 1..721: mol_type = genomic DNA; strain = HAI/2016-23065A
cccacccacggggcctactgggcgccagcacactggtatcacggtacctttgtgcgcctgttttataacccctcccccgatcgtaacgtagaagctgaacctaagcggtcaataggcggctcagaacaccatctgggtcttgaccaagcacttctgttaccccggactgagtatcaataagctgcttacgcggctgaaggagaaaacgtccgttacccggccaattacttcaagaaacccagtaccaccatgaaggttgcgcagcgtttcgctccgcacaaccccagtgtagatcaggtcgatgagtcaccgcattcctcacgggcgaccgtggcggtggctgcgttggcggcctgcccatggggtaacccatgggacgcttcaatactgacatggtgcgaagagtctattgagctaagtggtagtcctccggcccctgaatgcggctaatcctaactgcggagcagacgcccaagctccagtgggtagtctgtcgtaacgggtaactctgcagcggaaccgactactttgggtgtccgtgtttccttttattcttacattggctgcttatggtgacaattgagagattgttaccatatagctattggattggccatccggtgacaaatagagcaattatatatctttttgttggattcataccactcgacaaaacaaatttcagaaccttgtgttatattattagattaaatacagcaaa

SEQ ID NO: 16 - DNA, 721 bp, Echovirus E3
  source 1..721: mol_type = genomic DNA; strain = HAI/2016-23061
tcccacccacagggcccatagggcgctagcactctggtattgcggtacctttgtgcgcctgttttatattcccacccccaatcgcaacttagaagcagtacttcacgaccaacagtgggcgtgacacaccagccacgtctcggtcaagcacctctgtctccccggactgagtatcaataagctgctcacgcggctgagggagaaaacgtccgttacccggccaattacttcgagaaacctagtaccaccacgaaagttgcgcagcgtttcgatccgcacaaccccagtgtagatcaggtcgatgagtcaccgcattccccacgggcgaccgtggcggtggctgcgttggcggcctgcccatgggagaacccgtgggacgcttcaatactgacatggtgtgaagagtctattgagctaattggtagtcctccggcccctgaatgcggctaatcctaactgtggagcagattcccgcatgccagcgggtggtctgtcgtaacgggcaactctgcagcggaaccgactactttgggtgtccgtgtttccttttattcctatattggctgcttatggtgacaattgagagattgttaccatatagctattggattggccatccggtgacaaacagagcaattatctaccaatttgttggttttgtaccattgaatttcaacgcattcaaaactcttaactttattttgactcttaatacagcaaa

SEQ ID NO: 17 - DNA, 733 bp, Echovirus E3
  source 1..733: mol_type = genomic DNA; strain = HAI/2016-23056
ctgtgggttgttcccacccacggggcctactgggcgccagcacactggtatcacggtacctttgtgcgcctgttttacaacccctcccccgaacgtaacgtagaagctgaacctaagcggtcaataggcggctcagaacaccatctgggtcttgaccaagcacttctgttgccccggactgagtatcaataagctgctcacgcggctgaaggagaaaacgtccgttacccggccaattacttcaagaaacccagtaccaccatgaaggttgcgcagcgtttcgctccgcacaaccccagtgtagatcaggtcgatgagtcaccgcattcctcacgggcgaccgtggcggtggctgcgctggcggcctgcccatggggtaacccatgggacgcttcaatactgacatggtgcgaagagtcaattgagctaattggtagtcctccggcccctgaatgcggctaatcctaactgcggagcagacgcccaagctccagtgggtagtctgtcgtaacgggtaactctgcagcggaaccgactactttgggtgtccgtgtttccttttattcttacattggctgcttatggtgacaattgagaggttgttaccatatagctattggattggccatccggtgacaaatagagcaattgtatatctttttgttggattcataccactcgacaaaacaaatttcagaaccttgtgttatatcattagattaaacacagcaaa

SEQ ID NO: 18 - DNA, 708 bp, Echovirus E3
  source 1..708: mol_type = genomic DNA; strain = HAI/2016-23051A
cccactgggcgctagcacactggtatcccggtacctttgtgcgcctgttttataccccctcctccaaccgtaacctagaagcagcaccatatggccaatagtagacgtggcgcaccagccacgttttggtcaagcacttctgtttccccgggccgagtatcaataggctgctcacgcggctgaaggagaaagcgtccgttacccggccaattacttcgagaaacctagtaccaccatggaagttgcgcggcgtttcgctccacacaaccccagtgtagatcgggtcgatgagtcaccgcatttccccacgggtgaccgtggcggtggctgcgttggcggcctgcccatgaggaaactcatgggacgcttcaatactgacatggtgtgaagagtctattgagctaattggtagtcctccggcccctgaatgcggctaatcctaactgcggagcagatgctcacaaaccagtgggtggtctgtcgtaatgggcaactctgcagcggaaccgactactttgggtgtccgtgtttccttttattttcacactggctgcttatggtgacaattgaaggattgttaccatatagctattggattggccatccggtgacaaacagagcgattgtctatctatttgttggttttgtaccattagatttcaaagtcctgaaaaccctcaatttcgtcttaacactcaattcggcaag

SEQ ID NO: 19 - DNA, 723 bp, Echovirus E3
  source 1..723: mol_type = genomic DNA; strain = HAI/2016-23050
ttcccactcacagggcccactgggcgctagcacactggtatcccggtacctttgtgcgcctgttttataccccctcctccaaccgtaacctagaagcagcaccatatggccaatagtagacgtggcgcaccagccacgttttggtcaagcacttctgtttccccgggccgagtatcaataggctgctcacgcggctgaaggagaaagcgtccgttacccggccaattacttcgagaaacctagtaccaccatggaagttgcgcggcgtttcgctccacacaaccccagtgtagatcgggtcgatgagtcaccgcatttccccacgggtgaccgtggcggtggctgcgttggcggcctgcccatgaggaaactcatgggacgcttcaatactgacatggtgtgaagagtctattgagctaattggtagtcctccggcccctgaatgcggctaatcctaactgcggagcagatgctcacaaaccagtgggtggtctgtcgtaatgggcaactctgcagcggaaccgactactttgggtgtccgtgtttccttttattttcacactggctgcttatggtgacaattgaaggattgttaccatatagctattggattggccatccggtgacaaacagagcgattgtctatctatttgttggttttgtaccattagatttcaaagtcctgaaaaccctcaatttcgtcttaacactcaattcggcaag

SEQ ID NO: 20 - DNA, 741 bp, Echovirus E3
  source 1..741: isolate = 123-R2; mol_type = genomic DNA
ttaaaacagcctgtgggttgtacccactcacagggcccactgggcgctagcacactggtatcacggtacctttgtgcgcctgttttataatcccttccccaccgtaacatagaagctacacacactgatcaacagcaggcacagcacaccagttgtgtctcgatcaagcacttctgtctccccggaccgagtatcaatagactgcttacgcggttgaaggagaaaacgttcgtcacccggctgactacttcgaaaagcctagtagtaccatgaatgttgcggagtgtttcgctcagcacttcccccgtgtagatcaggctgatgagtcactgcattccccacgggtgaccgtggcagtggctgcgttggcggcctgcccatggggcaacccatgggacgcttcaatacagacatggtgcgaagagtctattgagctagtcagtagtcctccggcccctgaatgcggctaatcctaactgcggagcatgcgcctccgacccagggggtagcatgtcgtaatgggcaactctgcagcggaaccgactactttgggtgtccgtgtttccttttattcttatattggctgcttatggtgacaattgagagattgttgccatatagctattggattggccatccggtgagtaatagagctattatatactcctttgtgggttttgtgccactggatcacaaggtcttgaaaactctcacttttgtcataatactaaacactgcaaa

SEQ ID NO: 21 - DNA, 747 bp, Echovirus E3
  source 1..747: mol_type = genomic DNA; strain = Sakhalin/10_DU145
tgaccttaaaacagctctggggttgtacccactcacagggcccactgggcgctagcacactggtatcacggtacctttgcgcgcctgctttataaccccttccccaaacgtaacgtagaagctacacacactgatcaatagcaggcacagcgcaccagttgtgtcccgatcgagcacttctgtctccccggaccgagtatcaatagactgctcacgcggttgaaggagaaaacgttcgttaaccggctgactacttcgagaaacctagtagtactatgaaagttgcgaagcgtttcactcagcacttcccccgtgtaggtcaggccgatgagtcactgcgttccccacgggtgatcgtggcagtggctgcgttggcggcctgcccatggggtaacccatgggacgcttcaatacggacatggtgcgaagagtctattgagctagccagtagtcctccggcccctgaatgcggctaatcctaactgcggagcatgtgccctcgatccagagggtagcatgtcgtaacgggcaactctgcagcggaaccgactactttgggtgtccgtgtttctttttattcttatactggctgcttatggtgacaattgggagattgttaccatatagctattggattggccacccggtgactaatagagctattatctactcctttataggttttgtgccattgaactacaaggtcttaaagactctcaactttatcatcatacttaatactgcaaa

SEQ ID NO: 22 - DNA, 742 bp, Echovirus E3
  source 1..742: mol_type = genomic DNA; strain = Sakhalin/10_RD
ttaaaacagctctggggttgtacccactcacagggcccactgggcgctagcacactggtatcacggtacctttgtgcgcctgttttataaccccttccccaaacgtaacgtagaagctacacacactgatcaatagcaggcacagcgcaccagttgtgtcccgatcgagcacttctgtctccccggaccgagtatcaatagactgctcacgcggttgaaggagaaaacgttcgttaaccggctgactacttcgagaaacctagtagtactatgaaagttgcgaagcgtttcactcagcacttcccccgtgtagatcaggccgatgagtcactgcgttccccacgggtgaccgtggcagtggctgcgttggcggcctgcccatggggtaacccatgggacgcttcaatacggacatggtgcgaagagtctattgagctagccagtagtcctccggcccctgaatgcggctaatcctaactgcggagcatgtgccctcgatccagagggtagcatgtcgtaacgggcaactctgcagcggaaccgactactttgggtgtccgtgtttctttttattcttatactggctgcttatggtgacaattgggagattgttaccatatagctattggattggccacccggtgactaatagagctattatctactcctttataggttttgtgccattgaactacaaggtcttaaagactctcaactttatcatcatacttaatactgcaaa

SEQ ID NO: 23 - DNA, 571 bp, Echovirus E3
  source 1..571: isolate = E3/TO/BR/018; mol_type = genomic DNA
cttctgtctccccggactgagtatcaacaggctgcttgcgcggctgaaggagaaaacgttcgttaaccggccaattacttcgagaaacctagtaccaccatggatgttgcgcagtgtttcgctccgcacaaccccagtgtagatcaggtcgatgagtcaccgcaatccccacgggcgaccgtggcggtggctgcgctggcggcctgcccacggggcaacccgtgggacgcttcaatactgacatggtgcgaagagtctattgagctaattggtagtcctccggcccctgaatgcggctaatcccaactgtggagcagatacccacataccagtgggcagtctgtcgtaacgggcaactccgcagcggaaccgactactttgggtgtccgtgtttccttttacttttatattggctgcttatggtgacaattgaaagattgttgccatatagctattggattggccacccagtgagcaacagagcgataatatttctctttgttgggtttataccactagattttaaaaactacaacaccctactttacattgtttgcttgaacacgagaaa

SEQ ID NO: 24 - DNA, 667 bp, Echovirus E4
  source 1..667: mol_type = genomic DNA; strain = 2F5
ctgttttaaaaacccttcccccttttgtaacaaatctagaagtaatacacaccgatcaatagcgggcgcggcacaccagctgcgtcttgatcaagcacttctgtctccccggaccgagtatcaatagactgctcgcgtggttgaaggagaaagcgtccgttacccgaccaactacttcgagaaacccagtagtgctatggaagctgcgaagcgtttcgctcagcacacccccagtgtagatcaggtcgatgagtcaccgcattccccacgggcgaccgtggcggtggctgcgttggcggcctgcctacggagtaacccgtaggacgcttcaatgtggacatggtgcgaagagtcgattgagctagttggtagtcctccggcccctgaatgcggctaatcctaactgcggagcgcgtgccttcaatccagagggtggcgtgtcgtaacgggtaactctgcagcggaaccgactactttgggtgtccgtgtttccttttattttgtactggctgcttatggtgacaattgaaggattgttgccatatagctattggattggccacccggtgtctaacagagcaattatttacctctttgttggattcgtaccattcaataagactagttaccaaaccttgtgttatatcctcagattaaacacatcaaa

SEQ ID NO: 25 - DNA, 746 bp, Echovirus 4
  source 1..746: mol_type = genomic DNA; strain = AUS250G
ttaaaacagcctgtgggttgctcccacccacagggcccactgggcgtcagcacactggtatcaaggtacctttgtgcgcctgttttacaaaccctccccccccttgtaacaaacttagaagcaatgcacaccgatcaatagcgggcgcggcacgccagctgcgtcttgatcaagcacttctgtctccccggaccgagtatcaatagactgcttgcgtggttgaaggagaaagcgtccgttacccgaccaactacttcgagaagcccagtagcgccatggaagctgcgaagcgtttcgctcagcacacccccagtgtagatcaggtcgatgagtcaccgcattccccacgggcgaccgtggcggtggctgcgttggcggcctgcctacggggtaacccgtaggacgcttcaatgtagacatggtgcgaagagtcgattgagctagttggtaatcctccggcccctgaatgcggctaatcctaactgcggagcacgtgccttcaacccagagggtggcgtgtcgtaacgggcaactctgcagcggaaccgactactttgggtgtccgtgtttctttttattttgtactggctgcttatggtgacaattgaaggattgttaccatatagctattggattggccatccggtgcctaacagagcaattatttacctctttgttgggttcgtaccattcaataaggctaattaccaaatcttgtgttacatcctcagattgaacacatcgaa

SEQ ID NO: 26 - DNA, 742 bp, Echovirus E4
  source 1..742: mol_type = genomic DNA; strain = Pesacek
ttaaaacagcctgtgggttgcacccacccacagggcccattgggcgctagcaccctggtattacggtacctttgtgcgcctgttttatacccccatccccaatcgaaacttagaagcattacacactgatcaataggaggcgcggcacgccagccatgccaagatcaagcacttctgtctccccggaccgagtatcaatagactgcttgcgcggttgaaggagaaaacgttcgttacccggccaactacttcgagaaacctagtaccaccatgaaagttgcggagtgtttcgctcagcactaccccagtgtagatcaggccgatgagtcaccgcgttccccacgggtgaccgtggcggtggctgcgctggcggcctgcctatggggcaacccataggacgctctaatacagacatggtgtgaagagtctattgagctagttggtgatcctccggcccctgaatgcggctaatcctaactgcggagcacacgctcacaagccagtgagtggtgtgtcgtaatgggtaactccgcagcggaaccgactactttgggtgtccgtgtttccttttaacttcattttggctgcttatggtgacaattaagaaattgttaccatatagctattggattggccatccggtgactagtagagctattatatacttgtttgttggctttgtaccactaaactataaagtccttagaactcttgattttatactaattttgaataaggcaaa

SEQ ID NO: 27 - DNA, 742 bp, Echovirus E5
  source 1..742: mol_type = genomic DNA
ttaaaacagcctgtgggttgcacccacccacagggcccactgggcgctggtacactggtattaaggtacccttgtacgcctgttttatatccctcccccgatttgtaacttagaattaaagcaaacccgatcaatagtaggtgtggcaaaccagccacatcttgatcaagcacttctgtttccccggaccgagtatcaatagactgctgacgcggttgaaggagaaaacgttcgttacccggccaactacttcgggaaacctagtaccaccatgaaggttgcgcagtgtttcgctccgcacaaccccagtgtagatcaggtcgatgagccaccgcattccccacaggcgactgtggcggtggctgcgttggcggcctgcccatggggtaacccatgggacgcttcaatactgacatggtgcgaagagtccactgagctagttggtattcctccggcccctgaatgcggctaatcctaactgcggagcaggcacccacgagccagtgggcagcctgtcgtaatgggtaactctgcagcggaaccgactactttgggtgtccgtgtttccattttctttttattggctgcttatggtgacaatcacggaattgttaccatatagctattggattggccatccagtgactaacagagcagtaatattcctttttgttggttttgtaccactcaccgtcacgagcctcagaacactcgtattcatcttaacccttaacaagataaa

SEQ ID NO: 28 - DNA, 742 bp, Echovirus E6
  source 1..742: mol_type = genomic DNA
ttaaaacagcctgtgggttgcccccacccgcagggcccattgggcgctagcacactggtatcacggtacctttgtgcgcctgttttatcctccctccccaagtgcaacgtagaagcaagacacaaaaggtcaacagatagcccagcacaccagttgggtttcgaccaagcacttctgtctccccggaccgagtatcaataagctgctcacgcggctgaaggagaaagtgttcgttacccggctagttacttcgagaaacctagtaccaccatgaaggttgcgcagcgtttcgctccgcacaaccccagtgtagatcaggtcgatgagtcaccgcgttccccacgggcgaccgtggcggtggctgcgttggcggcctgcccatggggcaacccatgggacgcttcaatactgacatggtgcgaagagtctattgagctaactagtagtcctccggcccctgaatgcggataatcttaactgcggagcaggtgctcacaatccagtgggtggcctgtcgtaacgggcaactctgcagcggaaccgactactttgggtgtccgtgtttccttttatctctttgttggctgcttatggtgacaattgaacgattgttgccatatagctattggattggccatccggtgagcagcagatccattatttaccagtttgttggatttgtaccacttgatcacatagtctttagaacacttgtctttattctaaatcttaacaaggcaag

SEQ ID NO: 29 - DNA, 740 bp, Echovirus 9
  source 1..740: mol_type = genomic DNA; strain = Barty
ttaaaacagcctgtgggttgttcccacccacagggcccattgggcgctagcacactggtatcacggtacccttgtgcgcctgttttatccacccctccccatcgtaacctagaagcatgactccaacggtcaatagacagctcagtaaaccaattgagccttgaccaagcacttctgttaccccggactgagtatcaataggctgctcacgcggccgaaggagaaaatgttcgttacccggccaattacttcgagaaacctagtaccaccatgaaggttgcgcagtgtttcgcttagcacaaccccagtgtagatcaggccgatgagtcaccgcattccccacggtgaccgtggcggtggctgcgctggcggcctgcccatggggcaacccatgggacgcttcaatactgacatggtgtgaagagtctattgagctaattggatgtctccggcccctgaatacggctaatcctaatcgcggagcagatacccacgcaccagtgggcagtctgtcgtaacgggcaactctgcagcggaaccgactactttgggtgtccgtgtttccttttattcttgtactggctgcttatggtgacaattgagagattgttaccatatagctattggattggccatccagtgtcaaacagagcgattgtctacttgttcattggttttataccattgagttacaaggttctagccactcttaacttcattttaacactcaatacatcaaa

SEQ ID NO: 30 - DNA, 739 bp, Echovirus 9
  source 1..739: mol_type = genomic DNA; strain = Hill
ttaaaacagcctgtgggttgtacccacccacagggcccactgggcgccagcactctggtatcgcggtacctttgtgcgcctgttttgtttccctttaccccgaatggaacttagaagtaatgcacactgatcaatagcaggcgtggcaccagccacgtgatgatcaagcactactgtttccccggaccgagtatcaatagactgcttgcgcggttgaaggagaaaacgttcgttatccggctaactacttcgagaaacccagtaacaccatgaaggttgcaggcgatttcgctcagcacatccccagtgtagatcaggtcgatgagtcaccgcgttcccacgggcgaccgtggcggtggctgcgttggcggcctgcctatggggtaacccataggacgctctaatacggacatggtgcgaagagtctattgagctagttagtgttctccggcccctgaatgcggctaatcctaactgtggagcacatgcccctaatccaaggggtagtgtgtcgtaacgggcaactccgcagcggaaccgactactttgggtgtccgtgtttccttttattcttacattggctgcttatggtgacaattgagagattgttgccatatagctattggattggccatccggtgtctaatagagcgataatctaccagtttgttggatttgtaccactcaacttttcaacactcaagacactcaactacatactagcactcaacacagtaaa

SEQ ID NO: 31 - DNA, 751 bp, Echovirus E11
  source 1..751: mol_type = genomic DNA
ttaaaacagcctgtgggttgtacccacccacagggcccactgggcgctagcacactggtatcacggtacctttgtgcgcctgttttatacccccttcccgcaaccgcaaatttagaagcaaagctaacccgatcgatagcggatgcgcatgccagccgcattttgatcaagtacttctgtttccccggaccgagtatcaatagactgctcacgcggttgaaggagaaaacgtccgttacccgaccaactacttcgagaaacctagtaacatcatgaatgttgcagggcgtttcgatcagcacgaccctggtgtagatcaggctgatgagtcaccgcattccccacgggtgaccgtggcggtggctgcgttggcggcctgcctatggggtgacccataggacgctctaatacggacatggtgcgaagagtctattgagctagttggtagtcctccggcccctgaatgcggttaatcctaactgcggacgacatacccctaatccaaggggcagtgtgtcgtaacgggcaactctgcagcggaaccgactactttgggtgtccgtgtttccttttatttttatactggctgcttatggtgacaatctcagagttgttaccatatagctattggattggccatccggtgagcaacagagctgtcatttatcagtttgttggctttatacctctaaatcacacggttttttttttttggaacgcttgtattcatcttaaccctcaataaggcaaa

SEQ ID NO: 32 - DNA, 741 bp, Echovirus E12
  source 1..741: mol_type = genomic DNA
ttaaaacagcctgtgggttgtccccacccacagggcccactgggcgctagcacactggtatcccggtacctttgtgcgcctgttttatataccctcccctcagtaacctagaagttcatcacaaatgatcaatagttagctcaacaaaccagttgagcctagatcaagcacttctgttaccccgggctgagtatcaataagctgttgacacggctgaaggagaaaacgcccgttacccgaccagctacttcggagaacctagtatcaccatagaggttgcgtagcgtttcgctccgcacaaccccagtgtagatcaggtcgatgagtcaccgcgttccccacaggcgactgtggcggtggctgcgttggcggcctgcccatggggttacccatgggacgcttcaatactgacatggtgtgaagagttgactgagctagctggtagtcctccggcccctgaatgcggctaatcctaactgtggagcaagtgcccacaacccagtgggtggcttgtcgtaatgggcaactctgcagcggaaccgactactttgggtgaccgtgtttctctttattcttatattggctgcttatggtgacaatctcagagttgttaccatatagctattggtttggccaaccagtgactaacagagcaattatatatcttttcattggatttatacctataaacaacaccagttataccactttgtgttacattattggcttgaactcgaaaag

SEQ ID NO: 33 - DNA, 727 bp, Echovirus E13
  source 1..727: mol_type = genomic DNA; strain = HAI/2017-23078B
gttgttcccacccgcagggcccactgggcgctagcacactggtatctcggtacctttgtgcgcctgttttatagcccctcccccgaatgtaacgtagaagctgaacccaagcggtcaataggcggctcagaacaccatctgggtcttgaccaagcacttctgttaccccggactgagtatcaacaagctgctcacgcggctgaaggagaaaacgttcgttacccggccaattacttcgagaagcccagtaccaccatgaaggttgcgcagcgtttcgctccgcacaaccccagtgtagatcaggtcgatgagtcaccgcgttcctcacgggtgaccgtggcggtggctgcgctggcggcctgcccatggggtaacccatgggacgcttcaatactgacatggtgcgaagagtcgattgagctaattggtagtcctccggcccctgaatgcggctaatcctaactgcggagcagatgcccaagctccagtgggtagtctgtcgtaatgggtaactctgcagcggaaccgactactttgggtgtccgtgtttccttttattcttacattggctgcttatggtgacaattgagagattgttaccatatagctattggattggccatccggtgacaaatagagcaattatatatctttttgtcggattcgtaccactcgacaaaacaaatttccaaaccttgtgttacattattagactaaatacagcaaa

SEQ ID NO: 34 - DNA, 698 bp, Echovirus E13
  source 1..698: mol_type = genomic DNA; strain = HAI/2016-23072
gccagcacactggtatctcggtacctttgtgcgcctgttttatagcccctcccccgaatgtaacgtagaagctgaacctaagtggtcaataggcggctcagaacaccatctgggtcttgaccaagcacttctgttaccccggactgagtatcaataagctgctcacgcggctgaaggagaaaacgttcgttacccggccaattacttcgagaaacccagtatcaccatgaaggttgcgcagcgtttcgctccgcacaaccccagtgtagatcaggtcgatgagtcaccgcgttcctcacgggcgaccgtggcggtggctgcgctggcggcctgcccatggggcaacccatgggacgcttcaatgctgacatggtgcgaagagtcaattgagctaattggtagtcctccggcccctgaatgcggctaatcccaactgcggagcagacgcccaaactccagtgggtagtctgtcgtaacgggtaactctgcagcggaaccgactactttgggtgtccgtgtttccttttattcttacactggctgcttatggtgacaattgagagattgttaccatatagctattggattggccatccggtgacaaatagagcaattatatatctttttgttggattcgtaccactcgacaaaacaaatttcaaaaccttgtgttacattattagactaaatacagcaaa

SEQ ID NO: 35 - DNA, 722 bp, Echovirus E13
  source 1..722: mol_type = genomic DNA; strain = HAI/2016-23073
tcccacccacggggcccaccgggcgccagcacactggtatctcggtacctttgtgcgcctgttttatagcccctcccccgaatgtaacgtagaagctgaacctaagtggtcaataggcggctcagaacaccatctgggtcttgaccaagcacttctgttaccccggactgagtatcaataagctgctcacgcggctgaaggagaaaacgttcgttacccgaccaattacttcgagaaacccagtatcaccatgaaggttgcgcagcgtttcgctccgcacaaccccagtgtagatcaggtcgatgagtcaccgcgttcctcacgggcgaccgtggcggtggctgcgctggcggcctgcccatggggcaacccatgggacgcttcaatgctgacatggtgcgaagagtcaattgagctaattggtagtcctccggcccctgaatgcggctaatcccaactgcggagcagacgcccaaactccagtgggtagtctgtcgtaacgggtaactctgcagcggaaccgactactttgggtgtccgtgtttccttttattcttacactggctgcttatggtgacaattgagagattgttaccatatagctattggattggccatccggtgacaaatagagcaattatatatctttttgttggattcgtaccactcgacaaaacaaatttcaaaaccttgtgttacattattagactaaatacagcaaa

SEQ ID NO: 36 - DNA, 726 bp, Echovirus E13
  source 1..726: mol_type = genomic DNA; strain = HAI/2016-23075
gtgttcccacccacggggcctactgggcgccagcacactggtatcacggtacctttgtgcgcctgttttataacccctcccccgaatgtaacgtagaagctgaacctaagcggtcaataggcggctcagaacaccatctgggtcttgaccaagcacttctgttaccccggactgagtatcaataagctgcttacgcggctgaaggagaaaacgttcgttacccggccaattacttcaagaaacccagtaccaccatgaaggttgcgcagcgtttcgctccacacaaccccagtgtagatcaggtcgatgagtcaccgcgttcctcacgggcgaccgtggcggtggctgcgctggcggcctgcccatggggcaacccatgggacgcttcaatactgacatggtgcgaagagtcaattgagctaattggtagtcctccggcccctgaatgcggctaatcctaactgcggagcagacgcccaagctccagtgggtagtctgtcgtaacgggtaactctgcagcggaaccgactactttgggtgtccgtgtttccttttattcttacattggctgcttatggtgacaattgagagattgttaccatatagctattggattggccatccggtgacaaatagagcaattgtatatctttttgttggattcatatcactcgacaaaacaaatttcagaaccttgtgttatattattagattaaatacagcaaa

SEQ ID NO: 37 - DNA, 721 bp, Echovirus E13
  source 1..721: mol_type = genomic DNA; strain = HAI/2017-23082B
cccacccgcagggcccaccgggcgctagcacactggtatctcggtacctttgtgcgcctgttttatagcccctcccccgaatgtaacgtagaagctgaacccaagtggtcaataggcggctcagaacaccatctgggtcttgaccaagcacttctgttaccccggactgagtatcaacaagctgctcacgcggctgaaggagaaaacgttcgttacccggccaattacttcgagaagcccagtaccaccatgaaggttgcgcagcgtttcgctccgcacaaccccagtgtagatcaggccgatgagtcaccgcgttcctcacgggtgaccgtggcggtggctgcgctggcggcctgcccatggggtaacccatgggacgcttcaatactgacatggtgcgaagagtcgattgagctaattggtagtcctccggcccctgaatgcggctaatcctaactgcggagcagatgcccaagctccagtgggtagtctgtcgtaatgggtaactctgcagcggaaccgactactttgggtgtccgtgtttccttttattcttacattggctgcttatggtgacaattgagagattgttaccatatagctattggattggccatccggtgacaaatagagcaattatatatctttttgtcggattcgtaccactcgacaaaacaaatttccaaaccttgtgttacattgttagactaaatacagcaaa

SEQ ID NO: 38 - DNA, 741 bp, Echovirus E14
  source 1..741: mol_type = genomic DNA; strain = RO-81-1-79
taagtttcaattgggggttgtacccacccacagggcccattgggcgctagcactctggtatcacggtacccttgtgcgcctgttttataacccccccccaattgaaacttagaagttgcacgcactgatcaatagcaaacatagcaacccagctatgtcaagatcaagcactcctgtctccccggaccgagtatcaatagactgctcacgcggtcgaaggagaaagtgttcgttacccggctaactacttcgaaaaacctagtaacaccatgaaagttgcgaagtgtttcgctccgcacttccccagtgtagatcaggccgatgagtcaccgagtaccccacgggcgaccgtgtcggtggctgcgttggcggcctgcctacggggcgacccgtaggacgcttcaatacagacatggtgcgaagagtctattgagctagttagtagtcctccggcccctgaatgcggctaatcctaactgcggagcacgtgctctcaagccagagagtggcgtgtcgtaacgggcaactctgcagcggaaccgactactttgggtgtccgtgtttcctttatttcttactctggctgcttatggtgacaattgagagattgttaccatatagctattggattggccatccggtgagcaacagagcgatcatataccaatttgttggcttcatcccacttgacctaaaagccctacagacgctaaattttattatcattttaaacaatacaaa

SEQ ID NO: 39 - DNA, 687 bp, Echovirus E14
  source 1..687: isolate = ETH_P19/E14_2016; mol_type = genomic DNA
tggtatcacggtacctttgtgcgcctgttttatctacccctccccaatgtaatttagaagcatatgaaaagcggtcaatagccggctcagtatgccaactgagtcttgaccaagcacttctgttaccccggactgagtatcaataagctgctcgcgcggctgaaggagaaaacgttcgttacccggccaattacttcgagaaacccagtaccaccatggaggttgcgcggcgtttcgctccacacaaccccagtgtagatcaggtcgatgagtcaccgcgttccccacgggcgaccgtggcggtggctgcgttggcggcctgcccatgggttagcccatgggacgcttcaatactgacatggtgcgaagagtctattgagctaattggtagccctccggcccctgaatgcggctaatcctaactgcggagcagacgcctacatgccagtgggtagtctgtcgtaacgggcaactctgcagcggaaccgactactttgggtgtccgtgtttccttttatctttgtattggctgcttatggtgacaattgaaagattgttaccatatagctattggattggccatccagtgacaaacagagcgattgtttactcatttataggttttgtaccacttgactacaaggccctaatcactctcaattatatattgatactaaatacgacaaa

SEQ ID NO: 40 - DNA, 276 bp, Echovirus E14
  source 1..276: isolate = NSW-V04-2012-ECHO14; mol_type = genomic DNA
gctaatcctaactgcggagcagatacccacacaccagtgggcagtctgtcgtaacgggcaactctgcagcggaaccgactactttgggtgtccgtgtttccttttattcatatactggctgcttatggtgacaattgaaagattgttaccatatagctactggattggccatccggtgacaaatagagcggttatatatctttttgttggttttgtaccactgaaccctatagttctaaaaactctcaatctaattatattgttcaacacagcaaa

SEQ ID NO: 41 - DNA, 743 bp, Echovirus E14
  source 1..743: isolate = E14/P843/2013/China; mol_type = genomic DNA
ttaaaacagtctgtgggttgttcccactcacagggcccacgtggcgctagcacaccggtatttcggtacccttgtgcgcctgttttatgcacccctagccccacgtaacttagaagggaagcaacaacgatcaacagcaggtgtggcattccagccacatcgtgatcaagcacttctgtctccccggactgagtatcaataagctgctcgcgcggctgaaggagaaaacgttcgttacccggccaattacttcgagaaacccagtaccaccatggaggttgcgcagtgtttcgttccgcacaaccccagtgtagatcaggtcgatgagtcaccgcatcccccacgggcgaccgtggcggtggctgcgttggcggcctgcccatggggtaacccatgggacgcttcaatactgacatggtgtgaagagtctattgagctaattggtagtcctccggcccctgaatgcggctaatcctaactgcggagcagatacccataaaccaatgggcagtctgtcgtaacgggcaactctgcagcggaaccgactactttgggtgtccgtgtttccttttattctttatttggctgcttatggtgacaattgagagattgttgccatatagctattggattggccatccggtgacaaacagagcgatcgtgtacttatttattggttttgtaccacgtgaatttaaagttttacaaaccctaaatctcattattggacttaatacagcaaa

SEQ ID NO: 42 - DNA, 743 bp, Echovirus E14
  source 1..743: isolate = E14/P968/2013/China; mol_type = genomic DNA
ttaaaacagtctgtgggttgttcccactcacagggcccacgtggcgctagcacaccggtatttcggtacccttgtgcgcctgttttatgcacccctagccccacgtaacttagaagggaagcaacaacgatcaacagcaggtgtggcattccagccacatcgtgatcaagcacttctgtctccccggactgagtatcaataagctgctcgcgcggctgaaggagaaaacgttcgttacccggccaattacttcgagaaacccagtaccaccatggaggttgcgcagtgtttcgttccgcacaaccccagtgtagatcaggtcgatgagtcaccgcatcccccacgggcgaccgtggcggtggctgcgttggcggcctgcccatggggtaacccatgggacgcttcaatactgacatggtgtgaagagtctattgagctaattggtagtcctccggcccctgaatgcggctaatcctaactgcggagcagatacccataaaccaatgggcagtctgtcgtaacgggtaacttcgcagcggaaccgactactttgggtgtccgtgtttccttttattcttatattggctgcttatggtgacaattgaaagattgttgccatatttctattggattggccatccggtgacaaatatagcaattgtgtacctatttgttggttttgtaccactgaattacaaagttttaaaaaccctcgatttcattgtcgaacttaacacagcaaa

SEQ ID NO: 43 - DNA, 743 bp, Echovirus E15
  source 1..743: mol_type = genomic DNA; strain = CH 96-51
ttaaaacagcctgtgggttgtacccacccacagggcccactgggcgctagcactctggtattacggtacccttgtgcgcctgttttatataccccgccccaagcaaacgctagatgtaacgcacttatgatcaatagcaggcgtggcactccagccacgttatgatcaagcacttctgtctccccggaccgagtatcaatagactgctcacgcggtcgaaggagaaaacgttcgttacccgaccagctacttcgagaaacctagtaactccatggaggttgcagagtgtttcgttcagcacttcccccgtgtagatcaggctgatgagtcaccgcgttcctcacgggcgaccgtggcggtggctgcgttggcggcctgcctatgggtatacccataggacgctctaatactgacatggtgcgaagagtctattgagctagttggtagtcctccggcccctgaatgcggctaatcctaactgcggagcacatacccccaacccagggggcagtgtgtcgtaacgggtaactctgcagcggaaccgactactttgggtgtccgtgtttccttttattcttacattggctgcttatggtgacaattgagagattgttaccatatagctattggattggccatccagtgactaacagagctattatttacctttttgttggcttcgtatcacttggtttaaaagaggttagtactttatattgcattatattactaaacacgagaaa

SEQ ID NO: 44 - DNA, 719 bp, Echovirus E16
  source 1..719: isolate = ETH_P4/E16_2016; mol_type = genomic DNA
ccacccacagggcccatcgggcgcatgcacactggtatcacggtacctttgtgcgcctgttttatacaccccttcccgatgtaacgtagaatcacaacacaaagggtcaataggaggctcagtacgccaactgggtcacgaccaagcacttctgtcaccccggaccgagtatcaataagctgctcgcgcggctgaaggagaaagcgttcgttacccggccatttacttcgagaaacctagtagcaccatggaggttgcgcggcgtttcgctccacacgaccccggtgtagatcaggccgatgagtcaccgcactcctcacgggcgaccgtggcggtggctgcgctggcggcctgcccatggggtaacccatgggacgcttcaagactgacatggtgcgaagagtctattgagctgaatggtagtcctccggcccctgaatgcggctaatcctaactgcggagcagatacccaccagccagtgggcagtctgtcgtaatgggcaactctgcagcggaaccgactactttgggtgtccgtgtttctttttattttcatattggctgcttatggtgacaattgatagattgttgccatatagctattggattggccatccggtgtctaatagagcaattatattccaatttgttggatttgtaccccttaaccttaaagtcataagaacacttagttttgtgttactattgaacacattaaa

SEQ ID NO: 45 - DNA, 743 bp, Echovirus E16
  source 1..743: isolate = E16/P85/2013/China; mol_type = genomic DNA
ttaaaacagtctgtgggttgtaccccctcacagggcccacgtggcgctagcacaccggtatctcggtacccttgtgcgcctgttttatacaccctcacccccatgtaacttagaaggaaagcaacaatgatcaacagcaggtgtggcatcccagtcacatcgtgatcaagcacttctgtctccccggactgagtatcaatgggctgctcgcgcggctgaaggagaaaacgttcgttacccggccaattacttcgagaaacccagtaacaccatggaggttgcgcagtgtttcgctccacacaaccccagtgtagatcaggtcgatgagccaccgcattccccacgggcgaccgtggtggtggctgcgctggcggcctgcccatggggtaacccatgggacgcttcaatactgacatggtgtgaagagtctattgagctaattggtagtcctccggcccctgaatgcggctaatcctaactgcggagcagatactcacatgccagtgagcagtctgtcgtaacgggtgactctgcagcggaaccgactactttgggtgtccgtgtttccttttattccttatttggctgcttatggtgacaattgagagattgttgccatatagctattggattggccatccagtgacaaacagagctattgtgtacctgtttgttggttttgtaccactaaattttaaagtcttaagaaccatcaacttgatcatattactgaatacaagaaa

SEQ ID NO: 46 - DNA, 742 bp, Echovirus E16
  source 1..742: mol_type = genomic DNA; strain = Harrington
ttaaaacagcctgtgggttgttcccacccacagggcccactgggcgcaagcacactggtattacggtacctttgtgcgcctgttttacatcccctctcccattataacttagaagcacatacaaaacgaccaataggtggtccagcactccagctgggctctggtcaagtacttctgttaccccggactaagtatcaataagcggctaacgcggctgaaggagaaagcgtccgttacccggccaactacttcgggaaatctagtaacaccatgaaggttgcgcagtgtttcgctccgcacaaacccagtgtagatcaggtcgatgagtcaccgcattccccacaggcgactgtggcggtggctgcgttggcggcctgcccatggggcaacccatgggacgcttcaatactgacatggtgcgaagaatctactgagctagttggtagtcctccggcccctgaatgcggctaatcctaactgcggagcacatacccctaacccaaggggcagtgtgtcgtaacgggcaactctgcagcggaaccgactactttgggtgtccgtgtttccttttattcttatactggctgcttatggtgacaattgagaaattgttaccatatagcttttggattggccatccagtgactaacagagctattatttacttgtttgttggctttgtaccactcaaccttagagttttaaggactctcaatttggttctgctatcgaatacaacaaa

SEQ ID NO: 47 - DNA, 743 bp, Echovirus 17
  source 1..743: mol_type = genomic DNA; strain = CHHE-29
ttaaaacagcctgtgggttgttcccacccacagggcccattgggcgctagcactctggtattgcggtacctttgtgcgcctgttttatattccctccccctgaccgtaacttagaagtaacacacaccgatcaacagtaagcatggcacaccagccatgttttgatcaagcacttctgttatcccggactgagtatcaatagactgctcacgcggttgaaggagaaaacgttcgttacccggccaactacttcgaaaaacctagtaacaccatggaagttgcagagtgtttcgctcagcactaccccagtgtagatcaggtcgatgagtcaccgcattccccacgggcgaccgtggcggtggctgcgttggcggcctgcctatggggaaacccataggacgctctaatacagacatggtgcgaagagtctattgagctagttggtagtcctccggcccctgaatgcggctaatcctaactgcggagcacacaccctcaagccagggggcagtgtgtcgtaacgggcaactctgcagcggaaccgactactttgggtgtccgtgtttccccttactcttgtattggctgcttatggtgacaattttggaattgttgccatatagctattggattggccatccggtgacaaacagagcgattgtatacctattcgttggacttgtaccgctcaacgttacgagtctaacgactttatactacatcatctggttgaacacagcaaa

SEQ ID NO: 48 - DNA, 743 bp, Echovirus E18
  source 1..743: isolate = PC06/JS/CHN/2019; mol_type = genomic DNA
ataaaacagcctgtgggttgttcccacccacagggcccaccgggcgctagcacactggtatctcggtacctttgtgcgcctgttttatccacccttttcccatttaatttagaagcacgcgccaagacggtcgatagggagcccagtaagccaattgggctgtgaccaagcacttctgtaaccccgggccgagtatcaataagctgctcgcgcggctgaaagagaaaaagctcgttacccggccaattacttcgagaaacctagtagcatcatgaaagttgcgcagcgtttcgctccacacaaccccagtgtagatcaggccgatgagtcaccgcgttccccacgggtgaccgtggcggtggctgcgatggcggcctgcccatggggccacccatgggacgcttcaatactgacatggtgtgaagagtctattgagctaattggtagtcctccggcccctgaatgcggctaatcctaactgcggagcagatgcccacgcaccagtgggaagtctgtcgtaacgggtaactctgcagcggaaccgactactttgggtgtccgtgtttccttttatttctactctggctgcttatggtgacaattgaaaggttgttaccatatagccattggattggccatccggtgtcaaatagagcgattatttattcgtttgttgggtttgtaccactgaattacaaagccttaaacactcttaactacattttaatccttaactcatcaaa

SEQ ID NO: 49 - DNA, 743 bp, Echovirus E18
  source 1..743: mol_type = genomic DNA; strain = E18/JXY2-2/2019
ttaaaacagcctgtgggttgttcccacccacagggcccaccgggcgctagcacactggtatcacggtacctttgtgcgcctgttttatccacccttttcccacttaatctagaagcacgcaccaagacggtcaatagggagcccagtaaaccaattgggctatgaccaagcacttctgtaaccccgggccgagtatcaataagctgctcgcgcggctgaaggagaaaaagctcgttacccggccaattacttcgagaaacccagtagcatcatgaaagttgcgcagcgtttcgctccacacaaccccagtgtagatcaggccgatgagtcaccgcgttccccacgggtgaccgtggcggtggctgcgctggcggcctgcccatggggccacccatgggacgcttcaatattgacatggtgtgaagagtctattgagctaattggtagtcctccggcccctgaatgcggctaatcctaactgcggagcagatgcccacacaccagtgggaagtctgtcgtaacgggtaactctgcagcggaaccgactactttgggtgtccgtgtttccttttatttctactctggctgcttatggtgacaattgaaaggttgttaccatatagctattggattggccatccggtgtcaaatagagcgattatttacttgtttgttgggtttgtaccactgaactacaaagttttaaacactcttaactacatcttaatccttaactcatcaaa

SEQ ID NO: 50 - DNA, 726 bp, Echovirus E18
  source 1..726: isolate = QD9/SD/CHN/2019; mol_type = genomic DNA
gttttccccaccacagggcccaccgtgcgctagccccatggtatctcggtacccttgtgcgcctgttttatccacccttttcccatttaacttagaagcacgcgccaagacggtcaaaagggagcccagtaagccaattgggctatgaccaagcactcctgtaaccccgggccgagtatcaataagctgctcgcgcggctgaaggagaaaaagctcgttacccggccaattacttcgagaaacccagtagcatcatgaaagttgcgcagcgtttcgctccacacaaccccagtgtagatcaggtcgatgagtcaccgcgttccccacgggtgaccgtggcggtggctgcgctggcggcctgcccatggggccacccatgggacgcttcaatactgacatggtgtgaagagtctattgagctaattggtagtcctccggcccctgaatgcggctaatcctaactgcggagcagatgcccacacaccagtgggaagtctgtcgtaacgggtaactctgcagcggaaccgactactttgggtgtccgtgtttccttttatttctactctggctgcttatggtgacaattgaaaggttgttaccatatagctattggattggccatccggtgtcacatagagcgattatttacttgtttgttgggtttataccactgaactataaagttttaaatactcttaactacattttaatccttaactcattaaa

SEQ ID NO: 51 - DNA, 743 bp, Echovirus E18
  source 1..743: isolate = LJ/0530/2019; mol_type = genomic DNA
ttataacagcctgtgggttgttcccactcacagggcccaccgggcgctagcacaccggtatctcggtacctttgtgcgcctgttttatccacccttttcccatttaacttagaagcacgcgccaagacggtcaatagggagcccagtaaaccaattgggctatgaccaagcacttctgtaaccccgggccgagtatcaataagctgctcacgcggctgaaggagaaaaagctcgttacccggccaattacttcgagaaacccagtagcatcatgaaagttgcgcagcgtttcgctccacacaaccccagtgtagatcaggccgatgagccaccgcgttccccacgggtgaccgtggcggtggctgcgctggcggcctgcccatggggccacccatgggacgcttcaatactgacatggtgtgaagagtctattgagctaattggtagtcctccggcccctgaatgcggctaatcctaactgcggagcagatgcccacgcaccagtgggaagtctgtcgtaacgggtaactctgcagcggaaccgactactttgggtgtccgtgtttccttttatttttactctggctgcttatggtgacaattgaaaggttgttaccatatagctattggattggccatccggtgtcaaatagagcgattatttacttgtttgttgggtttgtgccactgaactacaaagttttgaacactcttaactacattctaatccttaacttattaaa

SEQ ID NO: 52 - DNA, 744 bp, Echovirus E18
  source 1..744: mol_type = genomic DNA; strain = 12J3
ttaaaacagcctgtgggttgttcccacccacagggcccacagggcgccagcacactggtatcacggtacctttgtgcgcctgttttatacaccctcacccccgatgtaacttagaagcacaactaaagcggtcaacagaaagctcagtaatccaactgagcgccgaccaagcacttctgttaccccggaccgagtatcaataagctgctcgcgcggctgaaggagaaaacgttcgttacccggccaattacttcgagaaacctagtaacaccatgaaagttgcgtagtgtttcgctccgcacaaccccagtgtagatcaggtcgatgagtcaccgcaatccccacgggcgaccgtggcggtggctgcgttggcggcctgcccatggggcaacccatgggacgcttcaatactgacatggtgtgaagagtctattgagctaattggtagtcctccggcccctgaatgcggctaatcccaactgcggagcagacgctcgcatgccagcgagtagtctgtcgtaacgggcaactctgcagcggaaccgactactttgggtgtccgtgtttccctttatttttatattggctacttatggtgacaattgaaagattgttaccatatagctattggattggccatccggtgacaaacagagcgatcatctactcttttgttgggttcgttccattgaatcacgaggtattgaacacactcaatttcattttaacccttaatacactaag

SEQ ID NO: 53 - DNA, 741 bp, Echovirus E18
  source 1..741: mol_type = genomic DNA; strain = USA/2015/CA-RGDS-1049
ttaaaacagcctgtgggttgctcccacccacagggcccaatgggcgctagcacactagtattacggtacttttgtgcgcctgttttatccctcacccccgatgtaacttagaagcataattaaagcggtcaatagaaagctcagtaatccaactgagtgccgaccaagcacttctgttaccccggaccgagtatcaataagctgttcgcgcggctgaaggagaaaacgttcgttacccggccaattacttcgagaaacctagtaacaccatgaaagttgcgtagtgtttcgctccgcacaaccccagtgtagatcaggtcgatgagtcaccgcaatccccacgggcgaccgtggcggtggctgcgttggcggcctgcccatggggcaacccatgggacgcttcaatactgacatggtgtgaagagtctattgagctaattggtagtcctccggcccctgaatgcggctaatcccaactgcggagcagacgctcgcatgccagcgagtagtctgtcgtaacgggcaactctgcagcggaaccgactactttgggtgtccgtgtttccctttatttttatattggctgcttatggtgacaattgaaagattgttaccatatagctattggattggccatccggtgacaaacagagcgatcatctactcttttgttgggttcgttccattgaatcacaaggtattgaacacactcaatttcattttaacccttaatacactaag

SEQ ID NO: 54 - DNA, 743 bp, Echovirus E18
  source 1..743: isolate = E18-221/HeB/CHN/2015; mol_type = genomic DNA
ttataacagcctgtgggttgtacccacccacagggcccaccgggcgctagcacactggtatctcggtacctttgtgcgcctgttttatccgcccttctcccatttaatttagaagcacgcgccaagacggtcaatagggagcccagtaagccaattgggccatgaccaagcacttctgtaaccccgggccgagtatcaataagctgctcgcgcggctgaaggagaaaaagctcgttacccggccaattacttcgagaagcccagtagcatcatgaaagttgcgcagtgtttcgctccgcacaaccccagtgtagatcaggccgatgagtcaccgcgttccccacgggtgaccgtggcggtggctgcgctggcggcctgcccatggggccacccatgggacgcttcaatactgacatggtgtgaagagtctattgagctaattggtagtcctccggcccctgaatgcggctaatcctaactgcggagcagatgcccacgcaccagtgggaagtctgtcgtaatgggtaactctgcagcggaaccgactactttgggtgtccgtgtttccttttatttctactctggctgcttatggtgacaattgaaaggttgttaccatatagctattggattggccatccggtgacaaatagagcgattatttacttgtttgttgggtttgtgccactgaactacaaagctttaaacactcttaactacattttaatccttaactcattaaa

SEQ ID NO: 55 - DNA, 742 bp, Echovirus E18
  source 1..742: mol_type = genomic DNA; strain = 12G5
taaaacagcctgtgggttgttcccacccacagggcccacagggcgccagcacactggtatcacggtacctttgtgcgcctgttttatgcaccctcaccctcaatgtaacttagaagtacagccaagcggtcaatagaagcttagtaatccaactgagctctgaccaagcacttctgttgccccggaccgagtatcaataagctgctcgcgcggctgaaggagaaaacgttcgttatccggccaattacttcgagaaacctagtaacgccatgaaagttgcgcagtgtttcgctccgcacaaccccagtgtagatcaggtcgatgagtcaccgcaaaccccacgggcgaccgtggcggtggctgcgttggcggcctgcccatggggcaacccatgggacgcttcaatactgacatggtgtgaagagtctattgagctagttggtagtcctccggcccctgaatgcggctaatcctaactgcggagcagacgcttgcataccagcgagtagtctgtcgtaacgggcaactctgcagcggaaccgactactttgggtgtccgtgtttccttttatcttttacattggctgcttatggtgacaattgaaagattgttgccatatagctattggattggccatccggtgacaaacagagcgatcatctattctttcgttgggttcgttccattgaatcacgaggtattgaatacactcaacctcattctaacccttaatacactaaa

SEQ ID NO: 56 - DNA, 743 bp, Echovirus E18
  source 1..743: isolate = E18-393/HeB/CHN/2015; mol_type = genomic DNA
ttataacagcctgtgggttgtacccacccagagggcccaccgggcgctagcacactggtatctcggtacctttgtgcgcctgttttatccgcccttctcccatttaatttagaagcacgcgccaagacggtcaatagggagcccagtaagccaattgggccatgaccaagcacttctgtaaccccgggccgagtatcaataagctgctcgcgcggctgaaggagaaaaagctcgttacccggccaattacttcgagaaacccagtagcaccatgaaagttgcgcagtgtttcgctccacacaaccccagtgtagatcaggccgatgagtcaccgcgttccccacgggtgaccgtggcggtggctgcgctggcggcctgcccatggggccacccatgggacgcttcaatactgacatggtgtgaagagtctattgagctaattggtagtcctccggcccctgaatgcggctaatcctaactgcggagcagatgcccacgcaccagtgggaagtctgtcgtaacgggtaactctgcagcggaaccgactactttgggtgtccgtgtttccttttatttctactctggctgcttatggtgacaattgaaaggttgttaccatatagctattggattggccatccggtgacaaatagagcgattatttacttgtttgttgggtttgtaccactgaactacaaagctttgaacactctttactacattttaatccttaactcattgaa

SEQ ID NO: 57 - DNA, 743 bp, Echovirus E18
  source 1..743: isolate = E18-398/HeB/CHN/2015; mol_type = genomic DNA
ttataacagcctgtgggttgtacccacccacagggcccaccgggcgctagcacactggtatctcggtacctttgtgcgcctgttttatccacccttctcccatttaatttagaagcacgcgccaagacggtcaatagggagcccagtaagccaattgggccatgaccaagcacttctgtaaccccgggccgagtatcaataagctgctcgcgcggctgaaggagaaaaagctcgttacccggccaattacttcgagaagcccagtagcatcatgaaagttgcgcagtgtttcgctccgcacaaccccagtgtagatcaggccgatgagtcaccgcgttccccacgggtgaccgtggcggtggctgcgctggcggcctgcccatggggccacccatgggacgcttcaatactgacatggtgtgaagagtctattgagctaattggtagtcctccggcccctgaatgcggctaatcctaactgcggagcagatgcccacgcaccagtgggaagtctgtcgtaatgggtaactctgcagcggaaccgactactttgggtgtccgtgtttccttttatttctactctggctgcttatggtgacaattgaaaggttgttaccatatagctattggattggccatccggtgacaaatagagcgattatttacttgtttgttgggtttgtaccactgaactacaaagctttaaacactcttaactacattttaatccttaactcgttaaa

SEQ ID NO: 58 - DNA, 743 bp, Echovirus E18
  source 1..743: isolate = E18-HeB15-54462/HeB/CHN/2015; mol_type = genomic DNA
ttataacagcctgtgggttgtacccacccacagggcccacagggggccagcacactggtatctcggtacctttgtgggcctgttttatccacccttcccccattttatttagaagcatgcaccaaaacggtcaacagggagcccagtaagccacttgttcattgaccaagtacttctgttaccccggaccgagtatcaataggctgctcgcgcggctgaaggagaaaacgttcgttacccggccaattacttcgagaaacccagtagcgccatggaggttgcgcagcgtttcgctccgcacaaccccagtgtagatcaggtcgatgagccaccgcgttccccacgggcgaccgtggcggtggctgcgttggcggcctgcccatgggactacccatgggacgcttcaatactgacatggtgtgaaaagtctattgagctaattggtagtcctccggcccctgaatgcggctaatcctaactgcggagcagacgcccacacaccagtgggcgatctgtcgtaatgggcaactctgcagcggaaccgactactttgggtgtccgtgtttccttttattcttaccctggctgcttatggtgacaattgagaagttgttgccatatagctattggattggccatccggtgacgagcagggcgataatttatttgtttatcgggtttgtaccactgaactacaaggttttaaacactttggattttattctgatcctcaactcactaaa

SEQ ID NO: 59 - DNA, 743 bp, Echovirus E18
  source 1..743: isolate = E18-HeB15-54498/HeB/CHN/2015; mol_type = genomic DNA
ttaaaacagcttgtgggttgttcccacccacagggcccactgggcgctagcacactggtatctcggtacctttgtgcgcctgttttatccacccttttcccatttaacttagaagcacgcgccaagacggtcaatagggagcccagtaagccaattgggctatgaccaagcacttctgtaaccccgggccgagtatcaataagctgctcgcgcggctgaaggagaaaaagctcgttacccggccaattacttcgagaaacctagtagcatcatgaaagttgcgcagtgtttcgctccacacaaccccagtgtagatcaggccgatgagttaccgcgttccccacgggtgaccgtggcggtggctgcgctggcggcctgcccatggggccacccatgggacgcttcaatactgacatggtgtgaagagtctattgagctaattggtagtcctccggcccctgaatgcggctaatcctaactgcggagcagatgcccacgtaccagtgggaagtctgtcgtaacgggtaactctgcagcggaaccgactactttgggtgtccgtgtttccttttatttctactctggctgcttatggtgacaattgaaaggttgttaccatatagctattggattggccatccggtgtcaaatagagcgattatttacttgtttgttgggtttgtaccactggactacaaagctttaaacactcttgactacattttaatccttaactcattaaa

SEQ ID NO: 60 - DNA, 647 bp, Echovirus E18
  source 1..647: isolate = ETH_P12/E18_2016; mol_type = genomic DNA
atacagtaacatagaagtcagaaacctacacgaccaatagcaggcgtgacgcaccagtcatgtcttggtcaaacacttctgtttccccggactgagtatcaataagctgctcacgcggctgaaggagaaaacgttcgttatccggctaactacttcgagaaacctagtaacaccatgaaagttgcagagtgtttcgctcagcacttccccccgtgtagatcaggtcgatgagtcactgcatcccccacgggcgaccgtggcagtggctgcgttggcggcctgcctatggggcaacccataggacgctctaatacagacatggtgtgaagagtctattgagctarytrgtagtcctccggcccctgaatgcggctaatcccaactgcggagcaggcacccacaaaccagcgggaagtctgtcgtaatgggcaactctgcagcggaaccgactactttgggtgtccgtgtttccttttattcatattttggctgcttatggtgacaattgaaaggttgttaccatatagctactggattggccatccggtgacaaatagagcaattatctatttgtttgttggttttataccgctgaaccacaaggttttaaataaccttaaatacattatattactgaacaccttaaa

SEQ ID NO: 61 - DNA, 290 bp, Echovirus E18
  source 1..290: isolate = NSW-V13A-2008-ECHO18; mol_type = genomic DNA
ggcccctgaatgcggctaatcctaactgcggagcagacgctcacacaccagtgggaagtctgtcgtaatgggcaactctgcagcggaaccgactactttgggtgtccgtgtttccttttattcttaccctggctgcttatggtgacaattgaaaggttgttaccatatagctattggattggccacccggtgacaagtagagcgattatttatttgtttgttgggtttgtaccactgaactacaaggttttaaacactttagacttcattctaatccttaactcactaaa

SEQ ID NO: 62 - DNA, 744 bp, Echovirus E18
  source 1..744: mol_type = genomic DNA; strain = A83/YN/CHN/2016
ttaaaacagccccgtgggttgttcccacccacagggcccaccgggcgctagcacactggtatctcggtacctttgtgcgcctgttttatccacccttttcccatttaatttagaagcacgcgccaagacggtcaatagggagcccagtaagccaattgggctatgaccaagcacttctgtaaccccgggctgagtatcaataagctgctcgcgtggctgaaggagaaaaagctcgttacccggccaattacttcgagaaacccagtagcatcatgaaagttgcgcagtgtttcgctccacacaaccccagtgtagatcaggccgatgagtcaccgcgttccccacgggtgaccgtggcggtggctgcgctggcggcctgcccatggggccacccatgggacgcttcaatactgacatggtgtgaagagtctattgagctaattggtagtcctccggcccctgaatgcggctaatcctaactgcggagcagatgcccacgcaccagtggggagtctgtcgtaacgggtaactctgcagcggaaccgactactttgggtgtccgtgtttccttttatttctactctggctgcttatggtgacaattgaaaggttgttaccatatagctattggattggccatccggtgacaaatagagcgattatttacttgtttgttgggtttgtgccactgaactacaaagctttaaacactcttaactacattttaatccttaactcattaaa

SEQ ID NO: 63 - DNA, 743 bp, Echovirus E18
  source 1..743: mol_type = genomic DNA; strain = A86/YN/CHN/2016
ttataacagcctgtgggttgtacccacccagagggcccaccgggcgctagcagggtggtatctcggtacctttgtgcgcctgttttatccgcccttctcccatttaatttagaagcacgcgccaagacggtcaatagggagcccagtaagccaattgggccatgaccaagcacttctgtaaccccgggccgagtatcaataagctgctcgcgcggctgaaggagaaaaagctcgttacccggccaattacttcgagaagcccagtagcatcatgaaagttgcgcagtgtttcgctccgcacaaccccagtgtagatcaggccgatgagtcaccgcgttccccacgggtgaccgtggcggtggctgcgctggcggcctgcccatggggccacccatgggacgcttcaatactgacatggtgtgaagagtctattgagctaattggtagtcctccggcccctgaatgcggctaatcctaactgcggagcagatgcccacgcaccagtgggaagtctgtcgtaatgggtaactctgcagcggaaccgactactttgggtgtccgtgtttccttttatttctactctggctgcttatggtgacaattgaaaggttgttaccatatagctattggattggccatccggtgacaaatagagcgattatttacttgtttgttgggtttgtgccactgaactacaaagctttaaacactcttaactacattttaatccttaactcattaaa

SEQ ID NO: 64 - DNA, 738 bp, Echovirus E18
  source 1..738: isolate = Jena/ST9524/10; mol_type = genomic DNA
cagcctgtgggttgtacccacccacagggcccacgtggcgctagcacactggtattccggtacctttgtgcgcctgttttatccaccccgtcccccactgtaacttagaagatatgcaaccctgatcaacagcaggtgtgacactccagtcacatcacgatcaagcacttctgttgccccggaccgagtatcaataagccactcgcgtggctgaaggagaaaacgttcgttatccgaccaactacttcgagaaacctagtaccaccctggaagttgcgtagcgtttcgctccacacaaccccagtgtagatcgggtcgatgagtcaccgcgttcctcacgggcgaccgtggcggtggctgcgttggcggcctgcccatggggcaacccatgggacgcttcaatactgacatggtgcgaagagtctattgagctagttggtggtcctccggcccctgaatgcggctaatcctaactgcggagcagatacccacatgccagtgggcgatctgtcgtaatgggtaactctgcagcggaaccgactactttgggtgtccgtgtttccttttattcttatattggctgcttatggtgacaattgagaagttgttaccatatagctattggattggccatccggtgacaaatagagcgattgtttatttgtttgttggatttataccactgaacttcaaggttttaaacaccctcaattttgtactagttcttaatacatcaaa

SEQ ID NO: 65 - DNA, 734 bp, Echovirus E18
  source 1..734: isolate = Jena/VI10227/10; mol_type = genomic DNA
ctgtgggttgtacccacccacagggcccacgtggcgctagcacactggtattccggtacctttgtgcgcctgttttatccaccccatcccccactgtaacttagaagatatgcaaccctgatcaacagcaggtgtgacactccagtcacatcacgatcaagcacttctgttgccccggaccgagtatcaataagccactcgcgtggctgaaggagaaaacgttcgttatccgaccaactacttcgagaaacctagtaccaccctggaagttgcgtagcgtttcgctccacacaaccccagtgtagatcgggtcgatgagtcaccgcgttcctcacgggcgaccgtggcggtggctgcgttggcggcctgcccatggggcaacccatgggacgcttcaatactgacatggtgcgaagagtctattgagctagttggtagtcctccggcccctgaatgcggctaatcctaactgcggagcagatacccacatgccagtgggcgatctgtcgtaatgggtaactctgcagcggaaccgactactttgggtgtccgtgtttccttttattcttatattggctgcttatggtgacaattgagaagttgttaccatatagctattggattggccatccggtgacaaatagagcgattgtttatttgtttgttggatttgtaccactgaacttcaaggttttaaacaccctcaattttgtactagttcttaacacattaaa

SEQ ID NO: 66 - DNA, 743 bp, Echovirus E18
  source 1..743: isolate = Kor05-ECV18-054cn; mol_type = genomic DNA
ttaaaacagcctgtgggttgtccccatccacagggcccaccgggcgctagcacactggtatctcggtacctttgtgcgcctgttttatccacccttttcccatccaacttagaagcacgcaccaaaacggtcaataggaagcctagtaagccaactgggttttgaccaagcacttctgtttccccggaccgagtatcaataggctgctcgcgcggctgaaggagaaaacgttcgttacccggccaattacttcgagaaacccagtagcaccatgaaggttgcgcagtgtttcgctccgcacatccccagtgcagatcaggccgatgagccaccgcgtcccccacgggcgaccgtggcggtggctgcgttggcggcctgcccatgggaccacccatgggacgcttcaatactgacatggtgtgaagagtctattgagctaattggtagtcctccggcccctgaatgcggctaatcctaactgcggagcagatgcccacacaccagtgggaagtctgtcgtaatgggtaactctgcagcggaaccgactactttgggtgtccgtgtttccttttattcttactctggctgcttatggtgacaattgaaaggttgttaccatatagctattggattggccacccggtgacaagtaaagcgattatttatttgtttgttgggtttgtaccactgaactataaggctttaaacactcttaacttcattctaatccttaattcactaaa

SEQ ID NO: 67 - DNA, 725 bp, Echovirus E19
  source 1..725: mol_type = genomic DNA; strain = HAI/2016-23039B
ttgatcccacccacagggcccatagggcgttagcactctggtattgcggtacctttgtgcgcctgttttatattcccacccccaatcgcaacttagaagcagtacttcacgaccaacagtgggcgtgacacaccagccacgtctcggtcaagcacttctgtctccccggactgagtatcaataagctgctcacgcggctgaaggagaaaacgtccgttatccggccaattacttcgagaaacctagtaccgccatgaaagttgcgcagcgtttcgatccgcacaaccccagtgtagatcaggtcgatgagtcaccgcgttccccacgggtgaccgtggcggtggctgcgttggcggcctgcccatgggagaacccatgggacgcttcaatactgacatggtgtgaagagtctattgagctaattggtagccctccggcccctgaatgcggctaatcctaactgcggagcagattcccgcatgccagcgggtggtctgtcgtaacgggcaactctgcagcggaaccgactactttgggtgtccgtgtttccttttattcctgtatcggctgcttatggtgacaattgagagattgttaccatatagctattggattggccatccggtgacaaacagagcaattatttaccaatttattggttttgtaccattgaattttaacgtattcaaaactcttaaccttattttggctcttaatacagcaaa

SEQ ID NO: 68 - DNA, 523 bp, Echovirus E19
  source 1..523: mol_type = genomic DNA; strain = HAI/2016-23036D
ggaaaaaacgtccgttatccggccaattacttcaagaaacccagtaccaccatgaaggttgcgcagcgtttcgctccgcacaaccccagtgtagatcaggtcgatgagtcaccgcattcctcacgggcgaccgtggcggtggctgcgctggcggcctgcccatggggcaacccatgggacgcttcaatactgacatggtgcgaagagtcaattgagctaattggtagtcctccggcccctgaatgcggctaatcctaactgtggagcagattcccgcatgccagcgggtggtctgtcgtaacgggcaactctgcagcggaaccgactactttgggtgtccgtgtttccttttattcctatatcggctgcttatggtgacaattgagagattgttaccatatagctattggattggccatccggtgacaaacagagcaattatttaccaatttattggttttgtaccattgaattttaacgtattcaaaactcttaaccttattttggctcttaatacagcaaa

SEQ ID NO: 69 - DNA, 716 bp, Echovirus E19
  source 1..716: mol_type = genomic DNA; strain = HAI/2016-23037D
cccacagggcccatagggcgctagcactctggtattgcggtacctttgtgcgcctgttttatattcccacccccaatcgcaacttagaagcagtacttcacgaccaacagtgggcgtgacacaccagccacgtctcggtcaagcacctctgtctccccggactgagtatcaataagctgctcacgcggctgagggagaaaacgtccgttacccggccaattacttcgagaaacctagtaccaccacgaaagttgcgcagcgtttcgatccgcacaaccccagtgtagatcaggtcgatgagtcaccgcgttccccacgggcgaccgtggcggtggctgcgttggcggcctgcccatgggagaacccatgggacgcttcaatactgacatggtgtgaagagtctattgagctaattggtagtcctccggcccctgaatgcggctaatcctaactgtggagcagattcccgcatgccagcgggtggtctgtcgtaacgggcaactctgcagcggaaccgactactttgggtgaccgtgtttccttttattcctatattggctgcttatggtgacagttgagagattgttaccatatagctattggattggccatccggtgacaaacagagcaattatctaccaatttatcggttttgtaccattgaatttcaacgcattcaaaaccctcaactttattttgactcttaatacagcaaa

SEQ ID NO: 70 - DNA, 579 bp, Echovirus E19
  source 1..579: mol_type = genomic DNA; strain = HAI/2016-23037E
accaagcacttctgtytccccggactgagtatcaataagctgctcacgcggctgaaggagaaaacgtccgttatccggccaattacttcgagaaacctagtaccgccatgaaagttgcgcagcgtttcgatccgcacaaccccagtgtagatcaggtcgatgagtcaccgcgttccccacgggtgaccgtggcggtggctgcgttggcggcctgcccatgggagaacccatgggacgcttcaatactgacatggtgtgaagagtctattgagctaattggtagccctccggcccctgaatgcggctaatcctaactgcggagcagattcccgcatgccagcgggtggtctgtcgtaacgggcaactctgcagcggaaccgactactttgggtgtccgtgtttccttttattcctatatcggctgcttatggtgacaattgagagattgttaccatatagctattggattggccatccggtgacaaacagagcaattatttaccaatttattggttttgtaccattgaattttaacgtattcaaaactcttaaccttattttggctcttaatacagcaaa

SEQ ID NO: 71 - DNA, 681 bp, Echovirus E19
  source 1..681: mol_type = genomic DNA; strain = HAI/2016-23042B
gcggtacctttgtgcgcctgttttatattcccaccccccaatcgcaacttagaagcagtacttcacgaccaacagtgggcgtgacacaccagccacgtctcggtcaagcacctctgtctccccggactgagtatcaataagctgctcacgcggctgagggagaaaacgtccgttacccggccaattacttcgagaaacctagtaccaccacgaaagttgcgcagcgtttcgatccgcacaaccccagtgtagatcaggtcgatgagtcaccgcgttccccacgggcgaccgtggcggtggctgcgttggcggcctgcccatgggaaaacccatgggacgcttcaatactgacatggtgtgaagagtctattgagctaattggtagtcctccggcccctgaatgcggctaatcctaactgcggagcagattcccgcatgccagcgggtggtctgtcgtaacgggcaactctgcagcggaaccgactactttgggtgtccgtgtttccttttattcctatattggctgcttatggtgacaattgagagattgttaccatatagctattggattggccatccggtgacaagcagagcaattatctaccaatttattggttttgtaccattgaatttcaacgcattcaaaactcttaactttattttgactcttaatacagcaaa

SEQ ID NO: 72 - DNA, 727 bp, Echovirus E19
  source 1..727: mol_type = genomic DNA; strain = HAI/2016-23046B
ggttgatcccacccacagggcccatagggcgctagcactctggtattgcggtacctttgtgcgcctgttttatattcccacccccaattgcaacttagaagcagtacttaacgaccaacagtgggcgtgacacaccagccacgtctcggtcaagcacttctgtctccccggactgagtatcaaaaagctgctcacgcggctgaaggagaaaacgtccgttatccggccaattacttcgagaaacctagtaccgccatgaaagttgcgcagcgtttcgatccgcacaaccccagtgtagatcaggtcgatgagtcaccgcgttccccacgggtgaccgtggcggtgactgcgttggcggcctgcccatgggagaacccatgggacgcttcaatactgacatggtgtgaagagtctattgagctaattggtagtcctccggcccctgaatgcggctaatcctaactgcggagcagattcccgcatgccagcgggtggtctgtcgtaacgggcaactctgcagcggaaccgactactttgggtgtccgtgtttccttttattcttatattggctgcttatggtgacaattgagagattgttaccatatagctattggattggccatccggtaacaaacagagcaattatttaccaatttattggttttgtaccattgaattttaacacattcaaaactcttaaccttatcttggctcttaatacagcaaa

SEQ ID NO: 73 - DNA, 725 bp, Echovirus E19
  source 1..725: mol_type = genomic DNA; strain = HAI/2016-23047
ttgatcccacccacagggcccatagggcgctagcactctggtattgcggtacctttgtgcgcctgttttatattcccacccccaattgcaacttagaagcagtacttaacgaccaacagtgggcgtgacacaccagccacgtctcggtcaagcacttctgtctccccggactgagtatcaaaaagctgctcacgcggctgaaggagaaaacgtccgttatccggccaattacttcgagaaacctagtaccgccatgaaagttgcgcagcgtttcgatccgcacaaccccagtgtagatcaggtcgatgagtcaccgcgttccccacgggtgaccgtggcggtgactgcgttggcggcctgcccatgggagaacccatgggacgcttcaatactgacatggtgtgaagagtctattgagctaattggtagtcctccggcccctgaatgcggctaatcctaactgcggagcagattcccgcatgccagcgggtggtctgtcgtaacgggcaactctgcagcggaaccgactactttgggtgtccgtgtttccttttattcttatattggctgcttatggtgacaattgagagattgttaccatatagctattggattggccatccggtaacaaacagagcaattatttaccaatttattggtttcgtaccattgaattttaacacattcaaaactcttaaccttatcttggctcttaatacagcaaa

SEQ ID NO: 74 - DNA, 725 bp, Echovirus E19; identical to SEQ ID NO: 67
  source 1..725: mol_type = genomic DNA; strain = HAI/2016-23054

SEQ ID NO: 75 - DNA, 725 bp, Echovirus E19
  source 1..725: mol_type = genomic DNA; strain = HAI/2016-23052
ttgatcccacccacagggcccatagggcgttagcactctggtatcacggtacctttgtgcgcctgttttatattcccacccccaatcgcaacttagaagcagtacttcacgaccaacagtgggcgtgacacaccagccacgtctcggtcaagcacttctgtctccccggactgagtatcaataagctgctcacgcggctgaaggaaaaaacgtccgttatccggccaattacttcgagaaacctagtaccgccatgaaagttgcgcagcgtttcgatccgcacaaccccagtgtagatcaggccgatgagtcaccgcgttccccacgggtgaccgtggcggtggctgcgttggcggcctgcccatgggggaacccatgggacgcttcaatactgacatggtgtgaagagtctattgagctaattggtagccctccggcccctgaatgcggctaatcctaactgcggagcagattcccgcatgccagcgggtggtctgtcgtaacgggcaactctgcagcggaaccgactactttgggtgtccgtgtttccttttattcctatatcggctgcttatggtgacaattgagagattgttaccatatagctattggattggccatccggtgacaaacagagcaattatttaccaatttattggttttgtaccattgaattttaacgtattcaaaactcttaaccttattttggctcttaatacagcaaa

SEQ ID NO: 76 - DNA, 724 bp, Echovirus E19
  source 1..724: mol_type = genomic DNA; strain = HAI/2016-23053
tgatcccacccacagggcccatagggcgttagcactctggtatcacggtacctttgtgcgcctgttttatattcccacccccaatcgcaacttagaagcagtacttcacgaccaacagtgggcgtgacacaccagccacgtctcggtcaagcacttctgtctccccggactgagtatcaataagctgctcacgcggctgaaggaaaaaacgtccgttatccggccaattacttcgagaaacctagtaccgccatgaaagttgcgcagcgtttcgatccgcacaaccccagtgtagatcaggccgatgagtcaccgcgttccccacgggtgaccgtggcggtggctgcgttggcggcctgcccatgggggaacccatgggacgcttcaatactgacatggtgtgaagagtctattgagctaattggtagccctccggcccctgaatgcggctaatcctaactgcggagcagattcccgcatgccagcgggtggtctgtcgtaacgggcaactctgcagcggaaccgactactttgggtgtccgtgtttccttttattcctatatcggctgcttatggtgacaattgagagattgttaccatatagctattggattggccatccggtgacaaacagagcaattatttaccaatttattggttttgtaccattgaattttaacgtattcaaaactcttaaccttattttggctcttaatacagcaaa

SEQ ID NO: 77 - DNA, 577 bp, Echovirus E19
  source 1..577: mol_type = genomic DNA; strain = HAI/2016-23062D
caagcacttctgtatccccggactgagtatcagtaggctgctcgcgcggctgaaggagaaaacgttcgttacccggccacttacttcgagaaacctagtaacgccatgaaagttgcgcagcgtttcgatccgcacaaccccagtgtagatcaggtcgatgagtcaccgcgttccccacgggcgaccgtggcggtggctgcgttggcggcctgcccatgggagaacccatgggacgcttcaatactgacatggtgtgaagagtctattgagctaattggtagtcctccggcccctgaatgcggctaatcctaactgtggagcagattcccgcatgccagcgggtggtctgtcgtaacgggcaactctgcagcggaaccgactactttgggtgtccgtgtttccttttattcctatattggctgcttatggtgacaattgagagattgttaccatatagctattggattggccatccggtgacaaacagagcgattatctaccaatttattggttttgtaccattgaatttcaacgcattcaaaactcttaactttattttgactcttaatacagcaaa

SEQ ID NO: 78 - DNA, 701 bp, Echovirus E19
  source 1..701: mol_type = genomic DNA; strain = HAI/2016-23063B
gggcgctagcactctggtattgcggtacctttgtgcgcctgttttatgttcccacccccaatcgcaacttagaagcggtacttcacgaccaacagtgggcgtgacacaccagccacgtctcggtcaagcacttctgtctccccggactgagtatcaataggctgctcacgcggctgaaggagaaaacgtccgttatccggccaattacttcgagaaacctagtaccgccatgaaagttgcgcagcgtttcgatccgcacaaccccagtgtagatcaggtcgatgagtcaccgcgttccccacgggtgaccgtggcggtggctgcgttggcggcctgcccatgggagaacccatgggacgcttcaatactgacatggtgtgaagagtctattgagctaattggtagtcctccggcccctgaatgcggctaatcctaactgcggagcagattcccgcatgccagcgggtggtctgtcgtaacgggcaactctgcagcggaaccgactactttgggtgtccgtgtttccttttattcctatattggctgcttatggtgacaattgagagattgttaccatatagctattggattggccatccggtgacaaacagagcgattatttaccaatttattggttttgtaccgttgaattttaacacattcagaactcttaaccttattttggctcttaatacagcaaa

SEQ ID NO: 79 - DNA, 715 bp, Echovirus E19
  source 1..715: mol_type = genomic DNA; strain = HAI/2016-23064B
ccacagggcccatagggcgctagcactctggtattgcggtacctttgtgcgcctgttttatgttcccacccccaatcgcaacttagaagcggtacttcacgaccaacagtgggcgtgacacaccagccacgtctcggtcaagcacttctgtctccccggactgagtatcaataggctgctcacgcggctgaaggagaaaacgtccgttatccggccaattacttcgagaaacctagtaccgccatgaaagttgcgcagcgtttcgatccgcacaaccccagtgtagatcaggtcgatgagtcaccgcgttccccacgggtgaccgtggcggtggctgcgttggcggcctgcccatggggtaacccatgggacgcttcaatactgacatggtgtgaagagtctattgagctaattggtagtcctccggcccctgaatgcggctaatcctaactgcggagcagattcccgcatgccagcgggtggtctgtcgtaacgggcaactctgcagcggaaccgactactttgggtgtccgtgtttccttttattcctatattggctgcttatggtgacaattgagagattgttaccatatagctattggattggccatccggtgacaaacagagcgattatttaccaatttattggttttgtaccgttgaattttaacacattcagaactcttaaccttattttggctcttaatacagcaaa

SEQ ID NO: 80 - DNA, 558 bp, Echovirus E19
  source 1..558: mol_type = genomic DNA; strain = HAI/2016-23067B
ggactgagtatcaataagctgctcacgcggctgagggagaaaacgtccgttacccggccaattacttcgagaagcctagtaccaccacgaaagttgcgcagcgtttcgatccgcacaaccccagtgtagatcaggtcgatgagtcaccgcgttccccacgggcgaccgtggcggtggctgcgttggcggcctgcccatgggagaacccatgggacgcttcaatactgacatggtgtgaagagtctattgagctaattggtagtcctccggcccctgaatgcggctaatcctaactgtggagcagattcccgcatgccagcgggtggtctgtcgtaacgggcaactctgcagcggaaccgactactttgggtgtccgtgtttccttttattcctatattggctgcttatggtgacaattgagagattgttaccatatagctattggattggccatccggtgacaaacagagcaattatctaccaatttattggttttgtaccattgaattacaacgcattcaaaactcttaactttattttggctcttaatacagcaaa

SEQ ID NO: 81 - DNA, 726 bp, Echovirus E19
  source 1..726: mol_type = genomic DNA; strain = HAI/2016-23070B
tttgatcccacccacagggcccatagggcgctagcactctggtattgcggtacctttgtgcgcctgttttatattcccacccccaatcgcaacttagaagcagtacttcacgaccaacagtgggcgtgacaaaccagccacgtctcggtcaagcacttctgtctccccggactgagtatcaataagctgctcacgcggctgagggagaaaacgtccgttatccggccgattacttcgagaaacccagtaccaccacgaaagttgcgcagcgtttcgatccgcacaaccccagtgtagatcaggtcgatgagtcaccgcgttccccacgggtgaccgtggcggtggctgcgttggcggcctgcccatgggggaacccatgggacgcttcaatactgacatggtgtgaagagtctattgagctaattggtagtcctccggcccctgaatgcggctaatcctaactgtggagcagattcccgcatgccagcgggtggtctgtcgtaacgggcaactctgcagcggaaccgactactttgggtgtccgtgtttccctttaatcctatattggctgcttatggtgacaattgagagattgttaccatatagctattggattggccatccggtgacaaacagagcaattatttaccaatttattggttttgtgccattgaatttcaacgcattcaaaactcttaaccttattttgactcttaatacagcaaa

SEQ ID NO: 82 - DNA, 725 bp, Echovirus E19
  source 1..725: mol_type = genomic DNA; strain = HAI/2017-23079
ttgatcccacccacagggcccatagggcgctagcactctggtattgcggtacctttgtgcgcctgttttatattcccacccccaatcgcaacttagaagcagtacttcacgaccaacagtgggcgtgacaaaccagccacgtctcggtcaagcacttctgtctccccggactgagtatcaataagctgctcacgcggctgagggagaaaacgtccgttatccggccaattacttcgagaaacccagtaccaccacgaaagttgcgcagcgtttcgatccgcacaaccccagtgtagatcaggtcgatgagtcaccgcgttccccacgggtgaccgtggcggtggctgcgttggcggcctgcccatgggggaacccatgggacgcttcaatactgacatggtgtgaagagtctattgagctaattggtagtcctccggcccctgaatgcggctaatcctaactgtggagcagattcccgcatgccagcgggtggtctgtcgtaacgggcaactctgcagcggaaccgactactttgggtgtccgtgtttccctttaatcctatattggctgcttatggtgacaattgagagattgttaccatatagctattggattggccatccggtgacaaacagagcaattatttaccaatttattggttttgtaccattgaatttcaacgcattcaaaactcttaaccttattttgactcttaatacagcaaa

SEQ ID NO: 83 - DNA, 680 bp, Echovirus E19
  source 1..680: mol_type = genomic DNA; strain = HAI/2017-23081A
gcggtacctttgtgcgcctgttttatattcccacccccaaacgcaacttagaagcagtacttcacgaccaacagtgggcgtggcacaccagccacgtctcggtcaagcacttctgtctccccggactgagtatcaataagctgatcgcgcggctgaaggagaaaacgtccgttatccggccaattacttcgagaaacctagtaccaccatgaaagttgcgtggcgtttcgatccgcacaaccccagtgtagatcaggtcgatgagtcaccgcgttccccacgggtgaccgtggcggtggctgcgttggcggcctgcccatgggggaacccatgggacgcttcaatactgacatggtgtgaagagtctattgagctaattggtagtcctccggcccctgaatgcggctaatcctaactgcggagcagattcccgcatgccagcgggtggtctgtcgtaacgggcaactctgcagcggaaccgactactttgggtgtccgtgtttccttttattcctatattggctgcttatggtgacaattgagagattgttaccatatagctattggattggccatccggtgacaaacagagcaattatttaccaatttattggttttgtaccattgaattttaacgcattcaaaactcttaaccttattttggctcttaatacatcaaa

SEQ ID NO: 84 - DNA, 673 bp, Echovirus E19
  source 1..673: isolate = ETH_P3/E19_2016; mol_type = genomic DNA
ctgtgtgcgcctgttttatccaccctaccctgtcgtaacttagaagttaatcaactatggtcactaggcggctcagtgtgccaactgagtctcgaccaagcacttctgttaccccggactgagtatcaataggctgctcacgcggctgaaggagaaaacgttcgttacccggccaattacttcgagaaacctagtaccaccatgaaggttgcgcagcgtttcgctccgcacaaccccagtgtagatcaggtcgatgagtcaccgcattccccacgggcgaccgtggcggtggctgcgttggcggcctgcccatggggcaacccatgggacgcttcaatactgacatggtgcgaagagtctattgagctaattggtagtcctccggcccctgaatgcggctaatcctaactgcggagcagacactcacaatccagtgagcagtctgtcgtaatgggcaactctgcagcggaaccgactactttgggtgtccgtgtttccttttattcttatactggctgcttatggtgacaattgaaagattgttaccatatagctattggattggccatccagtgactaatagagcgatcatttatttgtttgttggttttgtcccattaaactataaagttttgaacacacttaattttatcatactgcttaactcatcaaa

SEQ ID NO: 85 - DNA, 742 bp, Echovirus E19
  source 1..742: mol_type = genomic DNA; strain = NGR_2014
ttttaaagcctgtgggttgttcccacccacagggcccattgggcgctagcactctggtattgcggtacctttgtgcgcctgttttatatccccctcccccatttgaaacttagaagcaagacacaccgatcaatagctgatatggcaagccagccatatcttgatcaagtacttctgtttccccggaccgagtatcaatagactgcttgcgcggtcgaaggagaaagcgttcgttacccggctaattacttcgagaaacctagtaacaccatgaaagttgcagagtgtttcgctcagcacaaccccagtgtagatcaggctgatgagtcaccgcattccccacgggtgaccgtggcggtggctgcgttggcggcctgcctgtggggcaacccacaggacgctctaatacagacatggtgtgaagagtctattgagctaattagtagtcctccggcccctgaatgcggctaatcctaactgcggagcacgtacccccattccaggaggtggcgtgtcgtaacgggtaactctgcagcggaaccgactactttgggtgtccgtgtttccttttatctttacactggctgcttatggtgacaattgaaagattgttaccatatagctattggattggccatccggtgacaaatagagcgattgtatatttgttcattggatttgtaccactaagctataaagcattaaacactcttaaccttatcctagtgcttaactcaacaaa

SEQ ID NO: 86 - DNA, 745 bp, Echovirus E19
  source 1..745: isolate = PDV_BLR_IN; mol_type = genomic DNA
ttaaaacagggtgtgggttattcccacccacagggcccactgggcgccagcacactggtatcacggtacccttgtgcgcctgttttatatacccctcccctaaaatgtaacttagaagcaaatccacaaagaccaacagcagacacagcgcgccagttgtgttacggtcaagcacttctgttaccccggaccgagtatcaataagctactcacgtggctgaaggagaaaacgttcgttacccgcccgattacttcgagaagcctagtaacgccatggaggttgcgcggcgtttcgctccgcacaatcccagtgtagatcaggtcgatgagccaccgcattccccacgggtgaccgtggcggtggctgcgctggcggcctgcccatggggcaacccatgggacgcttcaatactgacatggtgcgaagagcctattgagctaattgggagtcctccggcccctgaatgcggctaatcccaactgcggagcaggcgcccacgtgccagtgggtagtctgtcgtaacgggcaactctgcagcggaaccgactactttgggtgtccgtgtttccttttattcctacattggctgcttatggtgacaattgagagattgttaccatatagctattggattggccatccggcgacaaacagagcgattgtttatttgttcattggttttataccactaaactatacaactttaaacaccctcaattttattttaacgcttaacacagcaaa

SEQ ID NO: 87 - DNA, 742 bp, Echovirus E19
  source 1..742: mol_type = genomic DNA; strain = Burke
ttaaaacagcctgtgggttgtacccacccacagggcccaatgggcgctagcactccggtattacggtacccttgtgcgcctgttttatttccccttccccaactgaaacttagaagaaatacacaatgatcgacagtaagcgtggcgcaccagccatgttttgatcaagcacttctgtttccccggaccaagtatcaatagactgctcacgcggttgaaggagaaagcgttcgttaaccggctaactacttcgagaaacccagtaacaccatgaaagttgcagagtgtttcgctcagcactcccccagtgtggatcaggtcgatgagtcactgcgttccccacgggtgaccgtggcagtggctgcgttggcggcctgcctgtggggcaacccacaggacgctctaatacggacatggtgtgaagagtctattgagctagttagtagtcctccggcccctgaatgcggctaatcctaactgtggagcacatgcccctaacccaaggggtggtgtgtcgtaatgggtaactccgcagcggaaccgactactttgggtgaccgtgtttccttttatttttacattggctgcatatggtgacgattgagagattgttgccatatagctattggattggccatccagtgtctaacagagctattgtatatctttttgttggatttgtaccacttgacttgaaagaggtcaggacactacaatacattatactgctgaatactgcaaa

SEQ ID NO: 88 - DNA, 722 bp, Echovirus E19
  source 1..722: mol_type = genomic DNA; strain = K/542/81
tccccacccacagggcccactgggcgctagcacaccggtattgcggtacctttgtgcgcctgttttatctacccttcccctacgtaacttagaagtacagcccatatggtcaatagacagctcagtaaaccaactgggctatgaccaagcacttctgttaccccggactgagtatcaataggctgctcacgcggctgaaggagaaaacgttcgttacccggccaattacttcgaaaagcttagtaccaccatggaggttgcgcagtgtttcgctccgcacaaccccagtgtagatcaggccgatgagtcaccgcgaccctcacgggcgaccgtggcggtggctgcgctggcggcctgcccatggggcaacccgtgggacgcttcaatactgacatggtgcgaagagcctattgagctaattggtattcctccggcccctgaatgcggctaatcccaactgcggagcagatacccacacaccagtgggcagtctgtcgtaacgggcgactctgcagcggaaccgactactttgggtgtccgtgtttccttttattcatttactggctgcttatggtgacaattgagaaattgttaccatatagctattggattggccatccggtgagcaacagagcgattatatacctctttgttggattcatatcacttaactttaacaattataacaccctactttacattatttgtttgaacacgaaaag

SEQ ID NO: 89 - DNA, 687 bp, Echovirus E20
  source 1..687: isolate = E20/TO/BR/016; mol_type = genomic DNA
ggtatcacggtacctttgtgcgcctgttttatgcaccccccccccattgcaacttagaagcacaccaaacacggtcaataggcggttcagtgcgccaactgggcctcgaccaagcacttctgttaccccggaccgagtatcaataggctgctcgcgcggctgaaggagaaaacgtccgttacccggccaattacttcgggaaacctagtaccaccatggaggttgcgcggcgtttcgctccacacagccccagtgtagatcaggtcgatgagtcaccgcgttccctacgggcgaccgtagcggtggctgcgttggcggcctgcccatggggcgacccatgggacgcttcaatactgacatggtgtgaagagtctactgagctaattggtattcctccggcccctgaatgcggctaatcccaactgcggagcagatacccacatgccagtgggcagtctgtcgtaatgggtaactctgcagcggaaccgactactttgggtgtccgtgtttccttttattcttatattggctgcttatggtgacaattgaaagattgttgccatatagctattggattggccatccagtaacaaacagagcgattgtttatttgtttgttggcttcgtgccgttaaatcataagattttaaaaacccttaatttcattttgctacttaatagtacaaa

SEQ ID NO: 90 - DNA, 655 bp, Echovirus E20
  source 1..655: mol_type = genomic DNA; strain = HAI/2016-23038B
acaccctcccccgagtgcaacttagaagatatccacacacggtcaataggcggctcagtatgccaactgagtcatgaccaagcacttctgttcccccggactgagtatcaataagctgcttacgtggctgaaggagaaaacgttcgttatccggccaattacttcgagaagcttagtaccaccatggaggttgcgcagtgtttcgttccgcacaaccccagtgtagatcaggtcgatgagtcaccgcactcctcacgggcgaccgtggcggtggctgcgctggcggcctgcccctggggcaacccctgggacgctccaatactgacatggtgcgaagagcctattgagctaattggtagtcctccggcccctgaatgcggctaatcctaactgcggagcagacacccacaagccagtgggcagtctgtcgtagtgggtaactctgcagcggaaccgactactttgggtgtccgtgtttccttttattcctacattggctgcttatggtgacaattgagagattgttaccatatagctattggattggccgtccagtgacaaacagagcgattatctatctatttgttggcttcgtaccattaaaccttagagtcctaaagaccctcaatttgattatacaatttaactctgtgaa

SEQ ID NO: 91 - DNA, 736 bp, Echovirus E20
  source 1..736: mol_type = genomic DNA; strain = HAI/2016-23041B
agcctgtgggttgttcccacccacagggcccaccgggcgctagcacactggtatcccggtacctttgtgcgcctgttttacacaccctcccccgatggcaacttagaagatttccacacacggtcaataggcggctcagtataccaactgggtcatgaccaagcacttctgttcccccggactgagtatcaataagctgctcacgtggctgaaggagaaaacgttcgttatccggccaattacttcgagaagcttagtaccaccatagaggttgcgcagtgtttcgctccgcacaaccccagtgtagatcaggtcgatgagtcaccgcactcctcacgggcgaccgtggcggtggctgcgctggcggcctgcccatggggcaacccatgggacgcttcaatactgacatggtgcgaagagcctattgagctaattggtattcctccggcccctgaatgcggctaatcctaactgcggagcagatacccacgagccagtgggcagtctgtcgtaatgggtaactctgcagcggaaccgactactttgggtgtccgtgtttccttttattcctatattggctgctaatggtgacaattgagagattgttgccatatagctattggattggccatccggtgacaaacagagcgattatctatctatttgttggcttcataccattaaaccttagagtcctaaagaccctcaacttaattatacaatttaactctgcgaa

SEQ ID NO: 92 - DNA, 685 bp, Echovirus E20
  source 1..685: mol_type = genomic DNA; strain = HAI/2016-23085B
tatcacggtacctttgtgcgcctgttttatacaccctcccccgagtgcaacttagaagatatccacacacggtcaataggcggctcagtatgccaactgagtcatgaccaagcacttctgttcccccggactgagtatcaataagctgcttacgtggctgaaggagaaaacgttcgttatccggccaattacttcgagaagcttagtaccaccatggaggttgcgcagtgtttcgttccgcacaaccccagtgtagatcaggtcgatgagtcaccgcactcctcacgggcgaccgtggcggtggctgcgctggcggcctgcccatggggcaacccatgggacgctccaatactgacatggtgcgaagagcctattgagctaattggtagtcctccggcccctgaatgcggctaatcctaactgcggagcagacacccacgagccagtgggcagtctgtcgtaatgggtaactctgcagcggaaccgactactttgggtgtccgtgtttccttttattcctacattggctgcttatggtgacaattgagagattgttaccatatagctattggattggccgtccagtgacaaacagagcgattatctatctatttgttggcttcgtaccattaaaccttagagtcctaaagaccctcaatttgattatacaatttaactctgtgaa

SEQ ID NO: 93 - DNA, 699 bp, Echovirus E20
  source 1..699: mol_type = genomic DNA; strain = HAI/2016-23065C
cgctagcacactggtatcccggtacctttgtgcgcctgttttatacaccctcccccgacagcaacttagaagatttccacacacggtcaataggcggctcagtatgccaactgggtcatgaccaagtacttctgtctccccggactgagtatcaataagctgctcacgtggctgaaggagaaaacgttcgttatccggccaattacttcgagaagcttagtaccaccatggaggttgcgcagtgtttcgttccgcacaaccccagtgtagatcaggtcgatgagtcaccgcactcctcacgggcgaccgtggcggtggctgcgctggcggcctgcccatggggcaccccatgggacgcttcaatactgacatggtgcgaagagcctattgagctaattggtaatcctccggcccctgaatgcggctaatcctaactgcggagcagataccctcgagccagtgggcagtctgtcgtaatgggcaactctgcagcggaaccgactactttgggtgtccgtgtttccttttattcctatattggctgcctatggtgacaattgagagattgttaccatatagctattggattggccatccagtgacaaacagagcgattatctacttatttgttggcttcataccattaaatcttagagtcctaaagaccctcaacttgattgtaaaatttaactctgtgaa

SEQ ID NO: 94 - DNA, 655 bp, Echovirus E20
  source 1..655: mol_type = genomic DNA; strain = HAI/2016-23068B
acaccctcccccgagtgcaacttagaagatatccacacacggtcaataggcggctcagtatgccaactgagtcatgatcaagcacttctgttcccccggactgagtatcaataagctgcttacgtggctgaaggagaaaacgttcgttatccggccaattacttcgagaagcttagtaccaccatggaggttgcgcagtgtttcgttccgcacaaccccagtgtagatcaggtcgatgagtcaccgcactcctcacgggcgaccgtggcggtggctgcgctggcggcctgcccatggggcaacccatgggacgcttcaatactgacatggtgcgaagagcctattgagctaattggtagtcctccggcccctgaatgcggctaatcctaactgcggagcagacacccacaagccagtgggcagtctgtcgtaatgggtaactctgcagcggaaccgactactttgggtgtccgtgtttccttttattcctatattggctgcttatggtgacaattgagagattgttaccatatagctattggattggccgtccagtgacaaacagagcgattatctatctatttgttggcttcgtaccattaaaccttagagtcctaaagaccctcaatttgattatacaatttaactctgcgaa

SEQ ID NO: 95 - DNA, 725 bp, Echovirus E20
  source 1..725: mol_type = genomic DNA; strain = HAI/2016-23069
tgttcccacccacagggcccaccgggcgctagcacactggtatctcggtacctttgtgcgcctgttttatacacccttccccgagtgcaacttagaagatatccacacacggtcaataggcggctcagtatgccaactgagtcatgaccaagcacttctgttcccccggactgagtatcaataagctgcttacgtggctgaaggagaaaacgttcgttatccggccaattacttcgagaagcttagtaccaccatggaggttgcgcagtgtttcgttccgcacaaccccagtgtagatcaggtcgatgagtcaccgcactcctcacgggcgaccgtggcggtggctgcgctggcggcctgcccatggggcaacccatgggacgcttcaatactgacatggtgcgaagagcctattgagctaattggtagtcctccggcccctgaatgcggctaatcctaactgcggagcagacacccacgagccagtgggcggtctgtcgtaatgggtaactctgcagcggaaccgactactttgggtgtccgtgtttccttttatccatacattggctgcttatggtgacaattgagagattgttaccatatagctattggattggccgtccagtgacgaacagagcgattatctatctatttgttggcttcgtaccattaaaccttagagtcctaaagaccctcaatttgattatacaatttaactctgcgaa

SEQ ID NO: 96 - DNA, 610 bp, Echovirus E20
  source 1..610: mol_type = genomic DNA; strain = HAI/2017-23080B
ataggcggctcagtatgccaactgggtcatgaccaagcacttctgtctccccggactgagtatcaataagctgctcacgtggctgaaggagaaaacgttcgttatccggccaattacttcgagaagcttagtaccaccatggaggttgcgcagtgtttcgttccgcacaaccccagtgtagatcaggtcgatgagtcaccgcactcctcacgggcgactgtggcggtggctgcgctggcggcctgcccatggggcaccccatgggacgcttcaatactgacatggtgcgaagagcctattgagctaattggtaatcctccggcccctgaatgcggctaatcctaactgcggagcagataccctcgagccagtgggcagtctgtcgtaatgggcaactctgcagcggaaccgactactttgggtgtccgtgtttccttttattcctatattggctgcttatggtgacaattgagagattgttaccatatagctattggattggccatccagtgacaaacagagcgattatctacttatttgttggctttgtaccattaaatcttagagtccttaagaccctcaacttgattatacaatttaactctgcgaa

SEQ ID NO: 97 - DNA, 699 bp, Echovirus E20
  source 1..699: mol_type = genomic DNA; strain = HAI/2017-23081B
cgctagcacactggtatcccggtacctttgtgcgcctgttttacgcaccctcccccgacagcaacttagaagatttccacacacggtcaataggcggctcagtatgccaactgggtcatgaccaagcacttctgtctccccggactgagtatcaataagctgctcacgtggctgaaggagaaaacgttcgttatccggccaattacttcgagaagcttagtaccaccatggaggttgcgcagtgtttcgttccgcacaaccccagtgtagatcaggtcgatgagtcaccgcactcctcacgggcgactgtggcggtggctgcgctggcggcctgcccatggggcaccccatgggacgcttcaatactgacatggtgcgaagagcctattgagctaattggtaatcctccggcccctgaatgcggctaatcctaactgcggagcagataccctcgagccagtgggcagtctgtcgtaatgggcaactctgcagcggaaccgactactttgggtgtccgtgtttccttttattcctatattggctgcttatggtgacaattgagagattgttaccatatagctattggattggccatccagtgacaaacagagcgattatctacttatttgttggctttgtaccattaaatcttggagtccttaagaccctcaacttgattatacaatttaactctgcgaa

SEQ ID NO: 98 - DNA, 563 bp, Echovirus E20
  source 1..563: mol_type = genomic DNA; strain = HAI/2016-23077B
cccccggactgagtatcaataagctgcttacgtggctgaaggagaaaacgttcgttatccggccaattacttcgagaagcttagtaccaccatggaggttgcgcagtgtttcgttccgcacaaccccagtgtagatcaggtcgatgagtcaccgcactcctcacgggcgaccgtggcggtggctgcgctggcggcctgcccatggggcaacccatgggacgcttcaatactgacatggtgcgaagagcctattgagctaattggtagtcctccggcccctgaatgcggctaatcctaactgcggagcagatacccacgagccagtgggcagtctgtcgtaatgggtaactctgcagcggaaccgactactttgggtgtccgtgtttccttttattcctacattggctgcttatggtgacaattgagagattgttaccatatagctattggattggccgtccagtgacaaacagagcgattatctatctatttgttggtttcgtaccattaaaccttagagtcctaaagaccctcaatttgattatacaattaaactctgcgaa

SEQ ID NO: 99 - DNA, 670 bp, Echovirus E20
  source 1..670: mol_type = genomic DNA; strain = HAI/2017-23083C
gtgctcctgttttacgcaccctcccccgacagcaacttagaagatttccacacacggtcaataggcggctcagtatgccaactgggtcatgaccaagcacttctgtctccccggactgagtatcaataagctgctcacgtggctgaaggagaaaacgttcgttatccggccaattacttcgagaagcttagtaccaccatggaggttgcgcagtgtttcgttccgcacaaccccagtgtagatcaggtcgatgagtcaccgcactcctcacgggcgactgtggcggtggctgcgctggcggcctgcccatggggcaccccatgggacgcttcaatactgacatggtgcgaagagcctattgagctaattggtaatcctccggcccctgaatgcggctaatcctaactgcggagcagataccctcgagccagtgggcagtctgtcgtaatgggcaactctgcagcggaaccgactactttgggtgtccgtgtttccttttattcctatattggctgcttatggtgacaattgagagattgttaccatatagctattggattggccatccagtgacaaacagagcgattatctacttatttgttggctttgtaccattaaatcttggagtccttaagaccctcaacttgattatacaatttaactctgcgaa

SEQ ID NO: 100 - DNA, 744 bp, Echovirus E20
  source 1..744: mol_type = genomic DNA; strain = KM-EV20-2010
ttaaaacagcctgtgggttgttcccacccgcagggcccacggggcgctagcacactggtattaaggtacccttgtgcgcctgttttatacacccctccccctaatgtaacttagaagcatgacttaagtggtcaatagatagctcagtaatccaactgagttccgaccaagtacttctgttaccccggaccgagtatcaataagctgttcacgcggctgaaggagaaagcgttcgttatccggccaattacttcgagaaacccagtatcaccatgaaagttgcgcagtgtttcgctccgcacaaccccagtgtagatcaggtcgatgagtcaccacagtcctcacgggcgaccgtggtggtggctgcgttggcggcctgcccatggggcaacccatgggacgcttcaatactgacatggtgtgaagagtctattgagctggatggtatccctccggcccctgaatgcggctaatcctagctgcggagcagacgctcgcatgccaacgggtagtctgtcgtaccgggtaactctgcagcggaaccgactactttgggtgtccgtgtttccttttatccttatatcggctgcttatggtgtcaattgaaagattgttaccatatagctaatggattggccatccgataacaaatagagtgattatctagttttttgttggatttgttccattgaactacaaggtattgaacacccttaatttcattttaacactcaacacaacaaa

SEQ ID NO: 101 - DNA, 742 bp, Echovirus E20
  source 1..742: mol_type = genomic DNA; strain = JV-1
ttaaaacagcctgtgggttgttcccacccacagggcccattgggcgctagcactctggtattacggtacctttgtgcgcctgttttatgtcccctcccccaatcgcaacttagaagcaacacacactgatcaacagtaagcgtggcataccagccacgttttgatcaagcacttctgttaccccggactgagtatcaatagactgctcacgcggttgaaggagaaagcgttcgttatccggccaactacttcgagaaacctagtaacaccgtgaaagttgcagagtgtttcgctcagcactaccccagtgtagatcaggtcgatgagtcaccgcattccccacgggcgaccgtggcggtggctgcgctggcggcctgcctacggggaaacccgtaggacgctctaatacagacatggtgcgaagagtctattgagctagttggtagtcctccggcccctgaatgcggctaatcctaactgcggagcacacacccccaagccagggggcagtgtgtcgtaacgggtaactctgcagcggaaccgactactttgggtgtccgtgtttcattttattcctatgctggctgcttatggtgacaattgacagattgttaccatatagctattggattggccatccggtgactaatagagccattatataccactttgttgggtttataccactcaacttgaaagaggtcaaaacactacagctcatcattaaattgaacacaacaaa

SEQ ID NO: 102 - DNA, 744 bp, Echovirus E21
  source 1..744: mol_type = genomic DNA; strain = 553/YN/CHN/2013
ttaaaacagcctgtgggttgcacccactcacagggcccattgggcgctagcacaccggtatcctggtacccttgtgcgcctgttttatccacccttcccccattgtaacttagaagttaatcaaacaaggtcgataggtggctcagtaatccaactgagtcttgaccaagcactactgtctccccggactgagtaccaatacgctgctaacgtggctgaaggggaaaacgttcgttatccggccaattacttcgagaaacctagtatcaccatgaaggttgcgcagcgtttcgctccgcacgacccctgtgtagatcaggccgatgagtcaccgcactccccacaggcgactgtggcggtggctgcgctggcggcctgcccatggggcaacccatgggacgcttcaatactgacatggtgcgaagagtctattgagctaattggtagtcctccggcccctgaatgcggctaatcctaactgtggagcagacacccacacgccagtgggcagtctgtcgtaacgggcaactccgcagcggaaccgactactttgggtgtccgtgtttccattttatttctatgctggctgcttatggtgacaattgaaagattgttaccatatagctattggattggccatccggtgacaaacagagcaattgtctacttatttgttggattcataccactggacaacgcagtctatcatactttgtgttacatcattaaactgaacacagcaaa

SEQ ID NO: 103 - DNA, 741 bp, Echovirus E21
  source 1..741: mol_type = genomic DNA; strain = Farina
ttaaaacagcctgtgggttgttcccacccacagggcccaccgggcgctagcacactggtatcgcggtacctttgtgcgcctgttttatttaccctgccctgatgtaacttagaagcatgacaccaacgatcaatagcaggctcaatgcaccaattgggtcaagatcaagcacttctgttaccccggactgagtatcaataagctgctagcgcggctgaaggagaaaaagttcgttacccggccagctacttcgagaaacctagtatcaccatgaaagttgcgtggcgtttcgctccgcacaaccccagtgtagatcaggtcgatgagtcaccgcattccccacgggcgaccgtggcggtggctgcgttggcggcctgcccgtggagcaatccatgggacgctataatacagacatggtgtgaagagtctattgagctagctggtagtcctccggcccctgaatgcggctaatcctaactgcggagcaggtacccacgaaccagtgggcagtctgtcgtaatgggcaactccgcagcggaaccgactactttgggtgtccgtgtttccttttatttcaacttggctgcttatggtgacaattgagagattgttaccatatagctattggattggccatccggtgactaacagagctatcatatacctttttattggctttgtgccacttactctgaaagaggtcaagactctgcattatatcatactattgaatgctataaa

SEQ ID NO: 104 - DNA, 721 bp, Echovirus E24
  source 1..721: mol_type = genomic DNA; strain = VEN/2018-23086
cccacccatagggcccactgggcgctagcacactggtatcacggtacctttgtgcgcctgttttatttaccctcccccaactgaaaattagaagccaaactcaaacggtcaataggaaacccagtgaaccaactgggctgcgaccaagcacttctgttaccccggactgagtatcaataggctgctcgcgcggctgaaggagaaaacgttcgttacccggccaattacttcgagaaacctagtaccaccatgaaagttgcgaaacgtttcactccgcacaaccccagtgtagatcgggtcgatgagtcaccgcattccccacgggtgaccgtggcggtggctgcgttggcggcccgcccatggggcaacccatgggacgcttcaatactgacatggtgtgaagagtctattgagctaattggtagtcctccggcccctgaatgcggctaatcctaactgcggatcagacacccacacgccagtgggcagtctgtcgtaatgggcaactctgcagcggaaccgactactttgggtgtccgtgtttctttttatccttatactggctgcttatggtgacaattgaaagattgttaccatatagctattggattggccatccggtatctaacagagctattatttacttatttgttggtttcgtacctctcagtatcagagttttgagaacacttaacttcatactactgctaaacactgcaag

SEQ ID NO: 105 - DNA, 746 bp, Echovirus E24
  source 1..746: isolate = PZ18G/JS/20120703; mol_type = genomic DNA
tttaaaaacaagcctgtgggttgctcccacccacagggcccactgggcgctagcacactggtatcacggtacctttgtgcgcctgttttatccgccccccccccttgtaatttagaagattcgcacagacggtcgacagacactccagcacaccagctggacactgaccaagcactcctgttaccccggactgagtatcaataggctgcccacgcggctgaaggagaaaacgttcgttacccggccaattacttcgagaaacttagtaacgccatgaaagttgcgcagtgtttcgctccgcacaaccccagtgtagatcaggtcgatgagtcaccgctttccccacgggcgaccgtggcggtggctgcgttggcggcctgcccatggggtaacccatgggacgcttcaatactgacatggtgcgaagagtctattgagctaattggtagtcctccggcccctgaatgcggctaatcctaactgcggagcagatactcacaagccagtgagctgtctgtcgtaacgggcaactctgcagcggaaccgactactttgggtgtccgtgtttcctctttattcttgatttggctgcttatggtgacaattgaaaaattgttaccgtatagctattggattggccatccagtgacaaatagagcaataatttatttgttcattggctttgtaccattaaaccataaggttttcaacactcttcaattcattattgcacttaactcatcaaa

SEQ ID NO: 106 - DNA, 742 bp, Echovirus E24
  source 1..742: mol_type = genomic DNA; strain = DeCamp
ttaaaacagcctgtgggttgcacccacccacagggcccacagggcgctagcactctggtatcacggtacctttgtgcgcctgttttattaccccttccccaattgaaaattagaagcaatgcacaccgatcaacagcaggcgtggcgcaccagtcacgtctcgatcaagcacttctgtttccccggaccgagtatcaatagactgctcacgcggttgaaggagaaagtgttcgttatccggctaaccacttcgagaaacccagtaacaccatgaaagttgcagggtgtttcgctcagcacttccccagtgtagatcaggtcgatgagtcaccgcgttccccacgggcgaccgtggcggtggctgcgttggcggcctgcctatgggttaacccataggacgctctaatacagacatggtgcgaagagtttattgagctggttagtatccctccggcccctgaatgcggctaatcctaactgcggagcacgtgcctccaatccagggggttgcatgtcgtaacgggtaactctgcagcggaaccgactactttgggtgtccgtgtttccttttattcttatactggctgcttatggtgacaatcgaggaattgttaccatatagctattggattggccatccggtgtctaacagagcgattatatacctctttgttggatttatgcagctcaataccaccaactttaacacattgaaatatatcttaaagttaaacacagcaaa

SEQ ID NO: 107 - DNA, 744 bp, Echovirus E25
  source 1..744: mol_type = genomic DNA; strain = USA/2016-19521
ttaaaccagcctgtgggttgttcccacccacagggcccactgggcgctagcacactggtatcccggtacctttgtgcgcctgttttaatcaccccccccccaaacgtaacttagaagtttataactcatggtcaataggcgactcagcataccagctgggtcttgaccaagcactcctgtaaccccggaccgagtatcaataggctgtttgcacggctgaaggagaaaacgtccgttatccgaccaattacttcgagaaacctagtaccaccgtgaaggttgcgcagtgtttcgctccgcacaaccccagtgtagatcaggtcgatgagtcaccgcactcctcacgggcgaccgtggcggtggctgcgctggcggcctgcccatggggcaacccatgggacgcttcaatactgacatggtgtgaagagtctattgagctaattggtagtcctccggcccctgaatgcggctaatcctaactgtggagcagatacccacacgccagtgggcagtctgtcgtaacgggcaactctgcagcggaaccgactactttgggtgtccgtgtttccttttattcttatactggctgcttatggtgacaattgagagattgttaccatatagctactggattggccatccaataacaaacagagcaattgtttatctttttgttggttttgtaccattaaattacaaggttttgaaaaccctcaaattggtcatactgtttaatacagcaaa

SEQ ID NO: 108 - DNA, 579 bp, Echovirus E25
  source 1..579: mol_type = genomic DNA; strain = USA/2018-23126
ggtcaagcacttctgtttccccggaccaagtatcaataggctgctcacgcggctgaaggagaaagtgttcgttatccggccaattacttcgagaaacctagtaccaccatggaagttgcgcagcgtttcgctccgcacgaccccggtgtagatcaggccgatgagtcaccgcactccccacgggtgaccgtggcggtggctgcgctggcggcctgctcatggggcaacccatgggacgcttcaatactgacatggtgtgaagagtctattgagctaattggtagtcctccggcccctgaatgcggctaatcccaaccgcggagcggattcccacactccagtgggcagtctgtcgtaacgggcaactctgcggcggaaccgactactttgggtgtccgtgtttcattttattccttattggctgcttatggtgacaattgaaagattgttgccatatagctattggattggccatccagtgacaaacagagcgattgtctatctatttgttggtttcataccattaaatttcaaagttttaaagactatcaacttgattatattgcttaatacagcaaa

SEQ ID NO: 109 - DNA, 571 bp, Echovirus E25
  source 1..571: mol_type = genomic DNA; strain = 10-4339-2
cttctgttatcccggactgagtatcaataagctgcttgcgcggctgaaggagaaaacgttcgttatccggccaattacttcgagaaacctagtaccaccatgaaggttgcgcggcgtttcgctccacacaaccccagtgtagatcaggccgatgagtcaccgcactccccacgggcgaccgtggcggtggctgcgttggcggcctgcccatggggcaacccatgggacgcttcaatactgacatggtgtgaagagtctattgagctaattggtagtcctccggcccctgaatgcggctaatcctaactgcggagcagatacccacatgccagtgggcagtctgtcgtaatgggtaactctgcagcggaaccgactactttgggtgtccgtgtttccttttattctaatattggctgcttatggtgacaattgagagattgttgccatatagctattggattggccatccagtgacaaacagagcaattgtttatctatttgttggtttcataccattaaatcttaaagctttaagaaccctcaactttattatacaacttaattcagtaca

SEQ ID NO: 110 - DNA, 643 bp, Echovirus E25
  source 1..643: mol_type = genomic DNA; strain = USA/CA/RGDS-2017-1010
aagcgtaacttagaagcttacctcacgtggtcaataggcggctcagtacaccaactgggtcttgaccaagcacttctgttaccccggaccgagtatcaataggctgcccacgcggctgaaggagaaaacgttcgttacccggccaattacttcgagaaacctagtatcaccatggaagttgcgcggcgtttcgctccacacaaccccagtgtagatcaggctgatgagtcaccgcactcctcacgggcgaccgtggcggtggctgcgttggcggcctgcccatggggcaacccatgggacgcctcaatactgacatggtgtgaagagtctattgagctaattggtagtcctccggcccctgaatgcggctaatcctaactgcggagcagacactcacaagccagtgggcggtctgtcgtaacgggcaactctgcagcggaaccgactactttgggtgtccgtgtttccttttattcctacattggctgcttatggtgacaattgagagattgttaccatatagctattggattggccatccggtgacaaacagagcgattgtctattcatttgtcggttttgtaccattaaactccaaagtcttgaaaaccctcaacctaatcatcctacttaactcagtaaa

SEQ ID NO: 111 - DNA, 571 bp, Echovirus E25
  source 1..571: isolate = NSW-V07-2007-ECHO25; mol_type = genomic DNA
cttctgtttccccggactgagtatcaataagctgctcgcgcggctgaaagagaaaatgttcgttatccggccaattacttcgagaaacccagtatcaccatggaggttgcgcagcgtttcgctccgcacgaccccagtgtagatcaggccgatgagtcaccgcattcctcacgggcgaccgtggcggtggctgcgttggcggcctgcccatggggcaacccatgggacgcttcaatactgacatggtgtgaagagtctattgagctaattggtagtcctccggcccctgaatgcggctaatcccaactgcggagcagatactcacatgccagtgagcagtctgtcgtaacgggcaactctgcagcggaaccgactactttgggtgtccgtgtttccttttattcttatattggctgcttatggtgacaattgagagattgttaccatatagctattggattggccatccagtgacaaacagggcaatagtttatctatttgttggttttataccactgaatttcaaggttttaaaaacccttaacttggtcttactactcaattcagtaag

SEQ ID NO: 112 - DNA, 571 bp, Echovirus E25
  source 1..571: isolate = NSW-V08-2008-ECHO25; mol_type = genomic DNA
cttctgtttccccggactgagtatcaataagctgctcgcgcggctgaaggagaaaacgttcgtcacccggccaattacttcgagaaacctagtaccaccatggaggttgcgcagcgtttcgctccacacaaccccagtgtagatcaggtcgatgagtcaccgcactcctcacgggcgaccgtggcggtggctgcgttggcggcctgcccatggggcaacccatgggacgcttcaatactgacatggtgcgaagagtctattgagctaattggtagtcctccggcccctgaatgcggctaatcctaactgcggagcagatacccacatgccagtgggcagtctgtcgtaatgggtaactctgcagcggaaccgactactttgggtgtccgtgtttccttttattcctacattggctgcttatggtgacaattgagagattgttaccatatagctattggattggccatccagtgacaaacagagcaattgtttatctatttgttggtttcatatcactgaatttcaaagtgttaaaaacccttaacctgatcatactacttaattcagcaaa

SEQ ID NO: 113 - DNA, 276 bp, Echovirus E25
  source 1..276: isolate = NSW-V09-2008-ECHO25; mol_type = genomic DNA
gctaatcctaactgcggagcagatacccacatgccagtgggcagtctgtcgtaatgggtaactctgcagcggaaccgactactttgggtgtccgtgtttccttttattcctacattggctgcttatggtgacaattgagagattgttaccatatagctattggattggccatccagtgacaaacagagcaattgtttatctatttgttggtttcatatcactgaatttcaaagtgttaaaaacccttaacctgatcatactacttaattcagcaaa

SEQ ID NO: 114 - DNA, 276 bp, Echovirus E25
  source 1..276: isolate = NSW-V58-2010-ECHO25; mol_type = genomic DNA
gctaatcccaactgcggggcagatacccacatgccagtgggcagtctgtcgtaacgggcaactctgcagcggaaccgactactttgggtgtccgtgtttccttttattattatattggctgcttatggtgacaattgagagattgttaccatatagctattggattggccatccggtatcaaatagagcaatcatttatctatttgttggatttgttccattaaattttaaagttttgcaaactctcaatttaattacattacttaattcagtgaa

SEQ ID NO: 115 - DNA, 711 bp, Echovirus E25
  source 1..711: mol_type = genomic DNA; strain = 61241-70868
agggcccactgggcgctagcactctggtattgcggtacctttgtgcgcctgttttatggcccccccccagttggaacttagaagtgaagcctctcgaccaatagtgggcgtggcacaccagccacgtcttggtcaagcacatctgtttccccggactgagtatcaataaactgctcgcgcggttgaaggagaaaacgttcgttacccggctaactacttcgggaaacccagtagtatcatggaaattgcgaggcgtttcgctcagcactccccccgtgcagatcaggtcgatgagtcactgcaccccccacgggtgaccgtggcagtggctgcgttggcggcctgcctatggggtgacccataggacgcttcaaaatggacatggtgcgaagagtctactgagctagttagtagtcctccggcccctgaatgcggcaaatcctaaccgcggagcaagtgtccacaaaccagtgggttgcttgtcgtaatgggtaactctgcggcggaaccgactactttgggtgtccgtgtttccttttatcttttattatggctgcttatggtgacaattgagagattgttaccatatagctattggattggccatccggtgaacaacagagcgatcatttacctctttgttggtttcgttccattgagtcccaaagtttttacgacactcaaatttattctcctacttaacaaagcaaa

SEQ ID NO: 116 - DNA, 744 bp, Echovirus E25
  source 1..744: mol_type = genomic DNA; strain = E25/ZE-wly/Zhejiang/CHN/2005
tttaaaacagcctgtgggttgttcccacccacagggcccattgggcgccagcacactggtatttcggtacctttgtgcgcctgttttatccacccctcccccaaacgtaacttagaagctcaacacacatggtcagtaggtggcccagtaagccaaccgggtcttgaccaagcacttctgttaccccggaccgagtatcaataggctgctcacgcggctgaaggagaaagtgttcgttatccggccaattacttcgagaaacctagtaccaccatggaagttgcgcagcgtttcgctccgcacgaccccagtgtagatcaggccgatgagtcaccgcactcctcacgggcgaccgtggcggtggctgcgctggcggcctgcccatggggcaacccatgggacgcttcaatgctgacatggtgcgaagagtctattgagctaattggtaatcctccggcccctgaatgcggctaatcctaactgcggagcagatatccacacgccagtgggcagtctgtcgtaacgggcaactctgcagcggaaccgactactttgggtgtccgtgtttctctttattctttattggctgcttatggtgacaattgaaagattgttgccatatagctattggattggccatccagtgacaaacagagcgatcgtttatctatttgttggtttcataccattaaattttaaagttttgaaaactatcaacttgatcatactacttaatacagcaaa

SEQ ID NO: 117 - DNA, 733 bp, Echovirus E25
  source 1..733: isolate = Jena/AN1380/10; mol_type = genomic DNA
ctgtgggttgttcccacccacagggcccactgggcgttagcactctggtattgcggtacctttgtgcgcctgttttatggccccccccccagttggaacttagaagtgaagcttctcgaccaatagtgggcgtggcacaccagtcacgtcttggtcaagcacatctgtttccccggactgagtatcaataaactgcttgcgcggttgaaggagaaaacgttcgttacccggctaactacttcgggaagcccagtagtatcatggaaattgcgaagcgtttcgctcagcactccccccgtgtagatcaggtcgatgagtcactgcaccccccacgggtgaccgtggcagtggctgcgttggcggcctgcctatggggtgacccataggacgcttcaaaatggacatggtgcgaagagcctactgagctagttagtagtcctccggcccctgaatgcggctaatcctaaccgcggagcaagcgtccacaaaccagtgggttgcttgtcgtaatgggtaactctgcggcggaaccgactactttgggtgtccgtgtttccttttatcttttattgtggctgcttatggtgacaattgagagattgttaccatatagctattggattggccatccggtgaacaacagagcggtcatttacctctttgttggtttcgttccattgagtcccaaagtttttacgacactcaaatttattctcctacttaacaaagcaaa

SEQ ID NO: 118 - DNA, 743 bp, Echovirus E25
  source 1..743: mol_type = genomic DNA; strain = XM0297
ttaaaacagcctgtgggttgttcccacccatagggcccactgggcgctagcacactggtattgtggtacctttgtgcgcctgttttatctacccctcccccaaacgtgacttagaagctcaacacatgtggtcagcaggtggcccagtataccaactgggtcttgatcaagcacttctgttaccccggaccgagtatcaataggctgctcacgcggctgaaggagaaagtgttcgttatccggccaattactacgagaaacctagtaccaccatggaagttgcgcggcgtttcgctccgcacaaccccagtgtagatcaggccgatgagtcaccgcactcctcacgggcgaccgtggcggtggctgcgctggcggcctgcccatggggcaacccatgggacgcttcaataccgacatggtgtgaagagtctattgtgctaattggtaatcctccggcccctgaatgcggctaatcccaactgcggagcagatacccacatgccagtgggcagtctgtcgtaacgggtaactctgcagcggaaccgactactttgggtgtccgtgtttctttttattctttattggctgcttatggtgacaattgagagattgttgccatatagctattggattggccatccggtgacaaacagaacaatagtttatctatttgttggtttcataccattaaattttaaagtattaaagactatcaacttgatcatactacttaatacagcaaa

SEQ ID NO: 119 - DNA, 743 bp, Echovirus E25
  source 1..743: mol_type = genomic DNA; strain = E25/2010/CHN/BJ
ttaaaacagcctgtgggttgttcccacccatagggcccactgggcgctagcacactggtattacggtacctttgtgcgcctgttttattcacccctctcccaaacgtaacttagaagctcaacacatgtggtcagtaggcagcccagtatgccaactgggtcttgaccaagcacttctgttaccccggactgagtatcaataggctgctcacgcggctgaaggagaaagtgttcgtcacccggccaattacttcgagaaacctagtatcaccatggaagttgcgcagcgtttcgctccgcacgaccccagtgtagatcaggccgatgagtcaccgcactcctcacgggcgaccgtggcggtggctgcgctggcggcctgcccatgaggcaactcatgggacgcttcaatactgacatggtgtgaagagtctattgagctaattggtagtcctccggcccctgaatgcggctaatcctaaccgcagagcagatacccacacgccagtgggcagtctgtcgtaacgggtaactctgcggcggaaccgactactttgggtgtccgtgtttctttttattctttattggctgcttatggtgacaattgaaagattgttgccatatagctattggattggccatccagtgacaaacagagcgactgtttatctatttgttggtttcataccattaaattttaaagtattaaagactatcaacttgatcatactacttaatacagcaaa

SEQ ID NO: 120 - DNA, 743 bp, Echovirus E25
  source 1..743: isolate = E25SD2010CHN; mol_type = genomic DNA
ttaaaaccaggctgtgggttgttcccacccacagggcccactgggcgctagcacactggtattgcggtacctttgtgcgcctgttttatataccctttcccaaatgtaacttagaagtttaaaccacatggtcagtagacaccccagtacaccaactgggtttggaccaagcacttctgttaccccggactgagtatcaataagctgctcgcgcggctgaaggagaaaacgttcgttatccgatcaattacttcgagaaacctagtaacaccatgaaagttgcgcggcgtttcgttccgcacaaccccagtgtagatcaggtcgatgagtcaccgcattccccacgggcgaccgtggcggtggctgcgttggcggcctgcccatggggtaacccatgggacgcttcaatactgacatggtgcgaagagtctattgagctaattggtattcctccggcccctgaatgcggctaatcctaactgcggagcagatacccacataccagtgggcagtctgtcgtaasgggcaactctgcagcggaaccgactactttgggtgtccgtgtttccttttattctttattggctgcttatggtgacaattgaaagattgttgccatatagctattggattggccatccagtgacaaacagagcgattgtttatctatttgttggtttcataccattaaattttaaagtcttaaaaactattaacttgatcatactacttaatacagcaaa

SEQ ID NO: 121 - DNA, 743 bp, Echovirus E25
  source 1..743: mol_type = genomic DNA; strain = HN-2
ttaaaaccaggctgtgggttgttcccacccatagggcccactgggcgccagcactctggtattccggtacctttgtgcgcctgttttatccacccctcccccaaacgtaacttagaagctcaacacatgtggtcagtaggtagcccagtatgccaactgggtcttgaccaagcacttctgttaccccggaccaagtatcaataggctgctcacgcggctgaaggagaaagtgttcgttacccggccgattacttcgagaaacctagtaccaccatggaagttgcgcagcgtttcgctccgcacgaccccagtgtagatcaggccgatgagtcaccgcactcctcacgggcgaccgtggcggtggctgcgctggcggcctgcccatggggcaacccatgggacgcttcaatactgacatggtgtgaagagtctattgagctaattggtagtcctccggcccctgaatgcggctaatcctaaccgcggagcagatacccacacgccagtgggcagtctgtcgtaacgggcaactctgcggcggaaccgactactttgggtgtccgtgtttcattttattctttattggctgcttatggtgacaattgaaagattgttgccatatagctatggattggccatccagtgacaaacagagcgattgtttatctatttgttggtttcataccattaaattttaaagttttaagaactatcaacttgatcatactacttaatacaacaaa

SEQ ID NO: 122 - DNA, 741 bp, Echovirus E25
  source 1..741: mol_type = genomic DNA; strain = JV-4
ttaaaacagcctgtgggttgtacccacccacagggcccactgggcgctagcactctggtactacggtacctttgtgtgcctgttttatacccctccccctactgaaacttagaagcaattcataccgatcaatagtgggcgtggcacaccagccgtgtctagatcaagcactcctgtttccccggaccgagtatcaatagactgctcacgcggttgaaggagaaaacgttcgttatccggctaactacttcgaaaaacctagtaacaccatgaaagttgcggagtgtttcactcagcacttccccagtgtagatcaggtcgatgagtcaccgcattcctcacgggcgaccgtggcggtggctgcgctggcggcctgcctatggggtgacccataggacgctctaatacagacatggtgcgaagagtctattgagctagttagtagtcctccggcccctgaatgcggataatcctaactgtggagcagatacccacgaaccagtgggcagtctgtcgtaacgggcaactccgcagcggaaccgactactttgggtgtccgtgtttccttttattccaaatctggctgcttatggtgacaattgagagattgttgccatatagctattggattggccatccggtgaataatagagcgataatatatttgtttgttggattcgtgccacttagtctgaaagttttgagaacactcaactacgttttattgctgaatagtgcaag

SEQ ID NO: 123 - DNA, 741 bp, Echovirus E26
  source 1..741: mol_type = genomic DNA; strain = Coronel
ttaaaacagcctgtgggttgttcccacccacagggcccactgggcgctagcacaccggtatcacggtacccttgtgcgcctgttttatccacctcccccgttgtaacttagaagctcaatacaaatggtcgatagccagcccgatacgccaattgggttttgaccaagcacttctgttaccccggactgagtaccaataggctgccaaagcggctgaaggggaaaacgttcgttaccccaccaactacttcgagaaacctagtaccaccatgaagattgcgcagcgtttcgctcagcacaaccccagtgtagatcaggtcgatgagtcaccgcattccccacaggcgactgtggcggtggctgcgttggcggcctgcccatggggctacccatgggacacttcaatatcgacatggtgcgaagagtctattgagctagttggtagtcctccggcccctgaatgcggataatcctaactgcggagcaggcacccacaagccagtgggcagcctgtcgtaacgggcaactctgcagcggaaccgactactttgggtgtccgtgtttctttttattcttacactggctgcttatggtgacaattgaagaattgttaccatatagctattggattggccatccagcgactaacagagctattatcttcttgtttgtggggtacgtaccactcaatttcacagtagtaaggactctcaatttcattttgtgcttgaataaggcgaa

SEQ ID NO: 124 - DNA, 538 bp, Echovirus E27
  source 1..538: isolate = ETH_P8/E27_2016; mol_type = genomic DNA
gctcacgcggctgaaggagaaaacgttcgttacccggccaattacttcgagaaacctagtaccactatgaaggttgcgcagcgtttcgctccgcacaaccccagtgtagatcaggccgatgagtcaccgcatccctcacgggcgaccgtggcggtggctgcgttggcggcctgcccatggggcaacccatgggacgcttcaatactgacatggtgcgaagagtctattgagctaattggtagtcctccggcccctgaatgcggctaatcctaactgcggagcagatacccgcgcaccagcgggcagtctgtcgtaatgggcaactctgcagcggaaccgactactttgggtgtccgtgtttccttttattcttatactggctgcttatggtgacaattgagagattgttaccatatagctattggattggccacccggtgactaacagagcgattatctaccaatttgttggttttgtgccattggacttttcaaccctaagaaccctcaatttcatattagtgcttaacacagcaaa

SEQ ID NO: 125 - DNA, 744 bp, Echovirus E27
  source 1..744: mol_type = genomic DNA; strain = Bacon
ttaaaacagcctgtgggttgtacccacctacagggcccactgggcgtcagcacactggtatcccggtacctttgtgcgcctgttttatattccccaccccacgttgtaacttagaagcaatgcaatttcggtcagtagtagacgcggcaacccagtcgtgtttcgaccaagcacttctgtaaccccggaccgagtatcaataagctgctcgcgcggctgaaggagaaaccgttcgttacccggctaactacttcgagaagcctactaacaccatgaacgttgcagagtgtttcactcagcacttcccccgtgtagatcaggtcgatgagtcaccgcgatccccacgggcgaccgtggcggtggctgcgttggcggcctgcctgtggggcaacccacaggacgctctaatacagacatggtgcgaagagcctattgagctagttagtagtcctccggcccctgaatgcggctaatcctaactgcggagcacatgcccacaaaccagtgggtggtgtgtcgtaacgggcaactctgcagcggaaccgactactttgggtgtccgtgtttctttttattctcatactggctgcttatggtgacaattgaaagattgttgccatatagctattggattagccatccggtgtcaaacagagcaattatttacctattcgttggttttgcacccttgaattttaaggttcttaaaacacttaatctcatattaaaactcaattcagcaaa

SEQ ID NO: 126 - DNA, 576 bp, Echovirus E29
  source 1..576: mol_type = genomic DNA; strain = HAI/2016-23048B
aagcacttctgttgccccggactgagtatcaataggctgctcacgcggctgaaggagaaaacgttcgttacccggccaattacttcgagaaacttagtaccaccatgaaggttgcgcggcgtttcgctccacacaaccccagtgtagatcaggtcgatgagtcaccgcgttccccacgggcgaccgtggcggtggctgcgttggcggcctgcccatgggtcaacccatgggacgcttcaatactgacatggtgtgaagagtctattgagctaattggtattcctccggcccctgaatgcggctaatcctaactgcggagcagatacccacatgccagtgggcagtctgtcgtaacgggcaactctgcagcggaaccgactactttgggtgtccgtgtttccttttatccttatactggctgcttatggtgacaattgagagattgttaccatatagctattggattggccatccggtgacaagcagagcaattatttatttgtttgttggcttcgtgccattaaatagtaaagttctaataaccctcaacctcatcttgttacttaatagtgcaaa

SEQ ID NO: 127 - DNA, 743 bp, Echovirus E29
  source 1..743: mol_type = genomic DNA; strain = JV-10
ataaaacagcctgtgggttgtacccacccacagggcccactgggcgctagcactctggtattacggtacccttgtgcgcctgttttatcttcccttccctcagtgcaacttagaagtataatcttaatgatcagtaggtggctcagcatgccagctgggtcttgatcaagcacttctgttaccccggactgagtatcaataagctgctcgcgcggctgaaggagaaagcgttcgttacccggccaattacttcgagaaacctagtaccaccatggaagttgcgcggcgtttcgctccgcacaatcccagtgtagatcaggtcgatgagtcaccgcattccccacgggcgaccgtggcggtggctgcgttggcggcctgcccatggggcaacccatgggacgcttcaatactgacatggtgcgaagagtctattgagctaattggtagtcctccggcccctgaatgcggctaatcctaactgcggagcagatacccacaagccagtgggcgatctgtcgtaacgggcaactctgcagcggaaccgactactttgggtgtccgtgtttctttttattcctatactggctgcttatggtgacaattgagaaattgttaccatatagctattggattggccatccggtgactaacagagcaattgtatacctgtttgttggttttgtgccattgaacttcaaagttttaaaaacactcaatttaataattctacttaatacaacaag

SEQ ID NO: 128 - DNA, 768 bp, Echovirus E30
  source 1..768: isolate = E30/TO/BR/032; mol_type = genomic DNA
ggacaggataccagtgtgcttgcgcccagtgggccctgtgggttgttcccacccacagggcccactgggcgctagcacactggtatcacggtacctttgtgcgcctgttttatccacccttaccccaaagcaacttagaagcacgcaccatgcggccgataggcggctcagtacgccaactgagtcttggccaagcacttctgttaccccgggccgagtatcaataagctgcttgtgtggctgaaggagaaagcgtccgttacccggccaactacttcgagaaacctagtaccaccatggatgttgcgtggcgtttcgctccgcacaaccccagtgtagatcaggtcgatgagtcaccgcacccctcacgggcgaccgtggcggtggctgcgctggcggcctgcctatggggcaacccataggacgcttcaatacggacatggtgagaagagtctattgagctagttagtagtcctccggcccctgaatgcggctaatcctaactgcggagcaggcgttcacaaaccagtggatagcctgtcgtaacgggcaactctgcagcggaaccgactactttgggtgtccgtgtttccttttattcctatactggctgcttatggtgacaattgatagattgttaccatatagctgttggattggccatccggtgactaatagagctatcatctacttgtttgttggtttcgtgccactcaactacaaagccttacaaaccctaaactttattttgacactcaatacagcaag

SEQ ID NO: 129 - DNA, 743 bp, Echovirus E30
  source 1..743: isolate = TL12C/NM/CHN/2016; mol_type = genomic DNA
ttaaaacagcctgtgggttgttcccacccgcagggcccactgggcgctagcacactggtatcacggtacttttgtgcgcctgttttatccacccttccccgaatgaaacttagaagtttgaattaaacggtcaataggaaacccagtacaccaactgggtcatgaccaagcacttctgtgaccccggaccgagtatcaataagctactcacgtggctgaaggagaaaacgttcgttacccggccaattacttcgagaaacttagtaccaccatgaaagttgcgcagcgtttcgctccgcacgaccccagtgtagatcaggctgatgagtcaccgcgttccccacgggtgaccgtggcggtggctgcgttggcggcctgcccttggggcaacccaagggacgcttcaatactgacatggtgcgaagagtctattgagctaattggtagtcctccggcccctgaatgcggctaatcccaactgcggagcagatacccacatgccagtgggcagtctgtcgtaatgggcaactctgcagcggaaccgactactttgggtgtccgtgtttcctttatttcttacactggctgcttatggtgacaattgagagattgttgccatatagctattggattggccatccggtgtctaatagagcaattatctacctttttgttggatttattccactcaactataaagtactcaaaacacttacatacattgtagatctcaacacaacaaa

SEQ ID NO: 130 - DNA, 743 bp, Echovirus E30
  source 1..743: isolate = TL7C/NM/CHN/2016; mol_type = genomic DNA
ttaaaacagcctgtgggttgttcccacccgcagggcccactgggcgctagcacactggtatcacggtacttttgtgcgcctgttttatccacccttccccaaatgaaacttagaagtttgaattaaacggtcaataggaaacccagtacaccaactgggtcatgaccaggcacctctgtgaccccggaccgagtatcaataagctactcacgtggctgaaggagaaaacgttcgttacccggccaattacttcgagaaacttagtaccaccatgaaagttgcgcagcgtttcgctccgcacgaccccagtgtagatcaggctgatgagtcaccgcgttccccacgggtgaccgtggcggtggctgcgttggcggcctgcccttggggcaacccaagggacgcttcaatactgacatggtgcgaagagtctattgagctaattggtagtcctccggcccctgaatgcggctaatcccaactgcggagcagatacccacatgccagtgggcagtctgtcgtaatgggcaactctgcagcggaaccgactactttgggtgtccgtgtttcctttatttcttacactggctgcttatggtgacaattgagagattgttgccatatagctattggattggccatccggtgtctaacagagcaattatctacctttttgttggatttattccactcaactataaagtactcaaaacacttacatacattgtagatctcaacacaacaaa

SEQ ID NO: 131 - DNA, 580 bp, Echovirus E30
  source 1..580: mol_type = genomic DNA; strain = USA/2018-23125
tggtcaagcacttctgtttcccggaccgagtatcaataagctactcacgtggctgaaggagaaaacgttcgttacccgaccaactacttcgagaaacctagtaccaccatgaatgttgcgcggcgtttcgctccgcactaccccagtgtagatcaggtcgatgagtcaccgcatccctcacgggcgaccgtggcggtggctgcgctggcggcctgcccatgggacaacccatgggacgcttcaacacagacatggtgtgaagagtctattgagctagttggtagtcctccggcccctgaatgcggctaatcctaactgcggagcagatccccacaagccagtgggcagtctgtcgtaatgggcaactctgcagcggaaccgactactttgggtgtccgtgtttccttttattctcatactggctgcttatggtgacaattgaaggattgttaccatatagctattggattggccatccggtgtctaacagagcaataatttatctttttgttggattcgtcccacttaactacagagcacttgcaacgctcaattacatcatagatctcaacctaacaaa

SEQ ID NO: 132 - DNA, 742 bp, Echovirus E30
  source 1..742: mol_type = genomic DNA; strain = Echo30/Hokkaido.JPN/21208/2017
ttaaaacagcctgtgggttgatcccacccacagggcctattgggcgctagcacactggtatcacggtacctttgtgcgcctgttttacccacccttccccgaaagaaacttagaagctcaacttgtgtggtcaacagcaagctcagtacgccaactgggccacgaccaagcacttctgttaccccggactgagtatcaataagctgctcgcgtggctgaaggagaaaacgttcgttatccggccaattacttcaagaaacccagtaccaccatgaaagttgcgcggcgtttcgttccgcacaaccccagtgtagatcaggccgatgagccaccgcgttccccacgggcgaccgtggcggtggctgcgttggcggcctgcccatggggcaacccatgggacgcttcaatactgacatggtgcgaagagtctattgagctaattggtagtcctccggcccctgaatgcggctaatcctaaccgcggagcagatacccacatgccagtgggcagtctgtcgtaacgggcaacttcgcggcggaaccgactactttgggtgtccgtgtttccttttattttatactggctgcttatggtgacaattgagagattgttaccatatagctattggattggccaaccggtgtccaacagagcgatcgtttacttgtttgttggattcgtgcccttgaactacaaagcactcgtaacgcttaaatacattatagacctcaacacagcaaa

SEQ ID NO: 133 - DNA, 398 bp, Echovirus E30
  source 1..398: mol_type = genomic DNA; strain = USA/2015/CA-RGDS-1046
ggcgaccgtggtggtggctgcgctggcggcctgcccatggggcaacccatgggacgcttcaatacagacatggtgtgaagagtctattgagctagttggtagtcctccggcccctgaatgcggctaatcctaactgcggagcagatccccacacaccagtgggcagtctgtcgtaatgggtaactctgcagcggaaccgactactttgggtgtccgtgtttccttttattcttatactggctgcttatggtgacaattgaaagattgttaccatatagctattggattggccatccagtgtctaacagagcaataatttatctttttgttggattcgtcccacttgactacagagcacttgcaacgctcaattacattatagatctcaacacaataaa

SEQ ID NO: 134 - DNA, 598 bp, Echovirus E30
  source 1..598: mol_type = genomic DNA; strain = USA/2017/CA-RGDS-1048
gtacaccaactgggccatgaccaagcacttctgtgaccccggaccgagtatcaataagctgctcacgtggctgaaggagaaaacgttcgttacccggccaattacttcgagaaacctagtaccgccatgaaagttgcgcagcgtttcgctccgcacgaccccagtgtagatcaggctgatgagtcaccgcgttccccacgggtgaccgtggcggtggctgcgttggcggcctgcccttggggcaacccaagggacgcttcaatactgacatggtgcgaagagtctattgagctaattggtagtcctccggcccctgaatgcggctaatcccaactgcggagcagatacccacataccagtgggcagtctgtcgtaatgggcaactctgcagcggaaccgactactttgggtgtccgtgtttcctttatttctcacactggctgcttatggtgacaattgagagattgttgccatatagctattggattggccatccggtgtctaatagagcaattatctacctttttgttggatttatcccacttaactataaagcactcaaaacactaatatacattgtggatcttaacacaacaaa

SEQ ID NO: 135 - DNA, 658 bp, Echovirus E30
  source 1..658: isolate = B001/USA/2016; mol_type = genomic DNA
tatccaccctctccccatagtaacttagaagtatgtttcatatggtcaataggcggctcagtatgccaactgagtctcgaccaagcacttctgttgccccggaccgagtatcaataagctactcacgtggctgaaggagaaaacgttcgttacccgaccaactacttcgagaaacctagtaccaccatggatgttgcgcggcgtttcgctccgcactaccccagtgtagatcaggtcgatgagtcaccgcattcctcacgggcgaccgtggtggtggctgcgctggcggcctgcccatggggcaacccatgggacgcttcaatacagacatggtgtgaagagtctattgagctagttggtagtcctccggcccctgaatgcggctaatcctaactgcggagcagatccccacacaccagtgggcagtctgtcgtaatgggtaactctgcagcggaaccgactactttgggtgtccgtgtttccttttattctcatactggctgcttatggtgacaattgaaagattgttaccatatagctattggattggccatccagtgtctaacagagcaataatttatctttttgttggattcgtcccacttgactacagagcacttgcaacgctcaattatattatagatctcaacacaacaag

SEQ ID NO: 136 - DNA, 576 bp, Echovirus E30
  source 1..576: mol_type = genomic DNA; strain = 16-I10
gcctattggtactcggtccggggtaacagaagtgcttggccaaggtggctgaaggggaaaacgttcgttaaccgactaataacttcgagaaacctagtaccaccatgaaagttgcgcagtgtttcgctccacacaaccccagtgtagatcaggtcgatgagtcaccgcgttccccacgggtgaccgtggcggtggctgcgttggcggcctgcccatggggcaacccatgggacgcttcaatactgacatggtgcgaagagtctattgagcttattggtagtcctccggcccctgaatgcggctaatcctaactgcggagcaggtacccacaagccagtgggtggcctgtcgtaacgggcaactctgcagcggaaccgactactttgggtgtccgtgtttccttttattcttaaattggctgcttatggtgacaattgaaaggttgttgccatatagctattggattggccatccggtgtctaatagagcaattatctacctttttgttggattcattccactcaactataaaacactcaaaacactcatatacattgtaggtctcaacacagcaaa

SEQ ID NO: 137 - DNA, 502 bp, Echovirus E30
  source 1..502: mol_type = genomic DNA; strain = 1-B4-TW
gccaattacttcgagaaacctagtaccaccatggaggttgcgcagcgtttcgctccgcacagccccagtgcagatcaggccgatgagtcaccgcattcctcacgggcgaccgtggcggtggctgcgttggcggcctgcccatggggcaacccatgggacgcttcaatactaacatggtgtgaagagtctattgagctaattggtagtcctccggcccctgaatgcggctaatcctaactgcggagcagatactcacatgccagtgggcagtctgtcgtaacgggcaactctgcagcggaaccgactactttgggtgtccgtgtttccttttattcttatactggctgcttatggtgacaattgagaaattgttaccatatagctattggattggccatccagtgacaaacagagcaattgtttacctatttgtcggcttcataccgttaaattttagagttttgaagacccttaacttgattatactattcaactctgcgaa

SEQ ID NO: 138 - DNA, 708 bp, Echovirus E30
  source 1..708: mol_type = genomic DNA; strain = 2002-59
cccattgggcgctagcacactggtattgcggtacctttgtgcgcctgttttatccacccttccctcaaatgaaacttagaagcttaacttgaatggtcaacaggaaacccagtacgccaactgggtcgcgaccaagcacttctgtaaccccggactgagtatcaataagctgcttgcgtggctgaaagagaaaacgtccgttacccggccaattacttcgagaaacctagtaccaccatggaggttgcgcagtgtttcgctccgcacaaccccagtgcagatcgggccgatgagtcaccgcgttccccacgggcgaccgtggcggtggctgcgctggcggcctgcccatggggtaacccatgggacgcttcaatactgacatggtgcgaagagtctattgagctagttggtagtcctccggcccctgaatgcggctaatcccaactgcggagcagatacccacacgccagtgggcagtctgtcgtaacgggcaactctgcagcggaaccgactactttgggtgtccgtgtttccttttatcttatactggctgcttatggtgacaattgagagattgttaccatatagctactggattggccatccggtgtctaacagagcgatcatttatctgtttgttggatttgtgcccttaaacctcaaagttctcaacactcttaaccttgtactacaatttaactcagcaaa

SEQ ID NO: 139 - DNA, 743 bp, Echovirus E30
  source 1..743: mol_type = genomic DNA; strain = KM/A363/09
ttaaaacagcctgtgggttgaacccatccacagggcccactgggcgcaagcacactggtatcacggtacctttgtgcgcctgttttatccacccttccccgaacgaaacttagaagtttgacttaaacggtcaatagaaagcccagtacaccaactgggtcgtgaccaagcacttctgtgaccccggactgagtatcaataagctactcacgtggctgaaggagaaaacgttcgttatccggccaattacttcgagaaacttagtaccaccatgaaggttgcgtagcgtttcgctccgcacaaccccagtgtagatcaggtcgatgagtcaccgcgttcctcacgggcgaccgtggcggtggctgcgttggcggcctgcccttggggcaacccaagggacgcttcaatactgacatggtgcgaagagtctattgagctaattggtagtcctccggcccctgaatgcggctaatcctaactgcggagcagatacccacatgccagtgggcagtctgtcgtaatgggcaactctgcagcggaaccgactactttgggtgtccgtgtttccttttattcttatactggctgcttatggtgacaattgagaaattgttaccatatagctattggattggccatccagtgtccaatagagcaatcatttaccttttcgttggatttattccacttgactacaaagcactcaaaacactcgaatacattgtagacctcaatacaacaaa

SEQ ID NO: 140 - DNA, 646 bp, Echovirus E30
  source 1..646: isolate = 1-MRS2013; mol_type = genomic DNA
cccgaaagaaacttagaagctcaacttgtgtggtcaatagtaagatcagtacgccaactgagccacgaccaacgtacttctgttaccccggactgagtatcaataagctgctcacgtggctgaaggagaaaacgtccgttacccggccaattacttcgagaaacccagtaccaccatgaaagttgcgcggcgtttcgctccgcacaaccccagtgtagatcgggccgatgagtcaccgcgttccccacgggcgaccgtggcggtggctgcgttggcggcctgcccatggagcaatccatgggacgcttcaatactgacatggtgcgaagagtctattgagctaattggtagtcctccggcccctgaatgcggctaatcctaactgcggagcagatactcacatgccagtgggcagtctgtcgtaacgggcaacttcgcagcggaaccgactactttgggtgtccgtgtttccttttatttcatactggctgcttatggtgacaattgagagattgttaccatatagctattggattggccatccagtgtccaacagagcgatcatttacttgtttgttggattcgtacccttgaactacaaagcactcgtaacgctcaaacacattatagacctccacacagcaaa

SEQ ID NO: 141 - DNA, 555 bp, Echovirus E30
  source 1..555: isolate = 3-MRS2013; mol_type = genomic DNA
actgagtatcaataagctgctcacgtggctgaaggagaaaacgttcgttatccgaccaattacttcgagaaacccagtaccaccatgaaagttgcgcggcgtttcgctccgcacaaccccagtgtagatcgggccgatgagtcaccgcgttccccacgggcgaccgtggcggtggctgcgttggcggcctgcccatggagcaatccatgggacgcttcaatactgacatggtgcgaagagtctattgagctaattggtagtcctccggcccctgaatgcggctaatcctaactgcggagcagatacccacaagccagtgggcagtctgtcgtaacgggcaacttcgcagcggaaccgactactttgggtgtccgtgtttccttttattttatactggctgcttatggtgacaattgagagattgttaccatatagctattggattggccatccggtgtccaacagagcgatcatttacttgtttgttggattcgtacccttgaactacaaagcactcgtaacgcttaaatacgttatagacctcaacacagcaaa

SEQ ID NO: 142 - DNA, 708 bp, Echovirus E30
  source 1..708: isolate = 4-MRS2013; mol_type = genomic DNA
gcccactgggcgctagcacactggtatcacggtacctttgtgcgcctgtttttcctaccctttcccgaaagaaacttagaagctcaacttgtgtggtcaatagtaagctcagtacgccaactgagccacgaccaagcacttctgttaccccggactgagtatcaataagctgctcacgtggctgaaggagaaaacgttcgttatccgaccaattacttcgagaaacccagtaccaccatgaaagttgcgcggcgtttcgctccgcacaaccccagtgtagatcgggccgatgagtcaccgcgttccccacgggcgaccgtggcggtggctgcgttggcggcctgcccatggagcaatccatgggacgcttcaatactgacatggtgcgaagagtctattgagctaattggtagtcctccggcccctgaatgcggctaatcctaactgcggagcagatacccacaagccagtgggcagtctgtcgtaacgggcaacttcgcagcggaaccgactactttgggtgtccgtgtttccttttattttatactggctgcttatggtgacaattgagagattgttaccatatagctattggattggccatccggtgtccaacagagcgatcatttacttgtttgttggattcgtacccttgtactacaaaacactcgtaacgcttaaatacgttatagacctcaacacagcaaa

SEQ ID NO: 143 - DNA, 741 bp, Echovirus E30
  source 1..741: isolate = 2012EM161; mol_type = genomic DNA
ttaaaacagcctgtgggttgttcccacccgcagggcccactgggcgctagcacactggtattacggtacctttgtgcgcctgttttatttcccttccccaaaacgtaatttagaagcagcacttcacgaccaatagcaggcgtggcacaccagccatgtcttggtcaagcacttctgtaaccccggactgagtatcaataaactgctcacgcggtcgaaggagaaaacgtccgttacccggctaactacttcgagaaacttagtaacgccatgaaaattgcgaagtgtttcgctcagcacatccccagtgtagatcaggttgatgagtcaccgcattccccacaggtaactgtggcggtggctgcgttggcggcctgcccatggggtgacccatgggacgcttcaatacggacatggtgtgaagagtctattgagctagttagtagtcctccggcccctgaatgcggctaatcctaactgtggagcatgcgcccccactccagagggtagcgtgtcgtaatgggtaactccgcagcggaaccgactactttgggtgtccgtgtttcctcttattttatattggctgcttatggtgacaattgaaagattgttaccatatagctattggattggccatccggtgacaaacagagctataatttaccagtttgtgggatttgttccgttaagtttgaaagtctttgatacatttagtttaatattattacttaatagtgcaaa

SEQ ID NO: 144 - DNA, 743 bp, Echovirus E30
  source 1..743: isolate = E30SD2010CHN; mol_type = genomic DNA
ttaaaaccgcactgtgggttggacccacccacagggcccaatgggcgctagcacactggtatcacggtacctttgtgcgcctgttttatccacccctccccgaacgaaacttagaagtttgagttaaacggtcaataggagacccagtacaccaactgggccgtgaccaagcacttctgtgaccccggaccgagtatcaataagctactcacgtggctgaaggagaaacgttcgttacccggccaattacttcgagaaacttagtaccaccatgaaggttgcgcagcgtttcgctccgcacaaccccagtgtagatcaggccgatgagtcaccgcgttccccacgggtgaccgtggcggtggctgcgttggcggcctgcccttggggcaacccaagggacgcttcaatactgacatggtgcgaagagtctattgagctaattggtagtcctccggcccctgaatgcggctaatcccaactgcggagcagatacccacataccagtgggcagtctgtcgtaatgggcaactctgcagcggaaccgactactttgggtgtccgtgtttcctttatttcttacactggctgcttatggtgacaattgagagattgttaccatatagctattggattggccatccggtgtctaatagagcaattatctacctttttgttggatttattccacttgactataaagcactcaaaacacttgaatacattgtggatcttaacacgacaaa

SEQ ID NO: 145 - DNA, 744 bp, Echovirus E30
  source 1..744: isolate = ECV30/GX10/05; mol_type = genomic DNA
ttaaaacagcctgtgggttgctcccacccacagggcccactgggcgctagcacactggtatcccggtacctttgtgcgcctgttttatccatcccacccccagctgtaacttagaagttcgacacacatggtcaatagatggctcagtgcaccaactgggtttagaccaagcacttctgttaccccggaccgagtatcaataagctgctcgcgcggctgaaggagaaaacgttcgttacccggccaattacttcgagaaacctagtaccaccatggaggttgcgcagcgtttcgctccgcacagccccagtgtagatcaggccgatgagccaccgcattcctcacgggcgaccgtggcggtggctgcgctggcggcctgcccatggggcaacccatgggacgcttcaatactaacatggtgtgaagagtctattgagctaattggtagtcctccggcccctgaatgcggctaatcctaactgcggagcagatactcacatgccagtgggcagtctgtcgtaacgggcaactctgcagcggaaccgactactttgggtgtccgtgtttccttatattcttatactggctgcttatggtgacaattgagaaattgttaccatatagctattggattggccatccagtgacaaacagagcaattgtttacctatttgttggcttcataccgttgaattttagagttttgaagacccttaacttgattacactatttaactctgtaaa

SEQ ID NO: 146 - DNA, 744 bp, Echovirus E30
  source 1..744: mol_type = genomic DNA; strain = Kor08-ECV30
ttaaaacagcctgtgggttgctcccacccacagggcccactgggcgctagcacactggtatcccggtacctttgtgcgcctgttttatccaccccacccccagctgtaatttagaagttcgacacacatggtcaatagatggctcagtgcaccaactgggtttagaccaagcacttctgttaccccgggccgagtatcaataagctgctcgcgcggctgaaggagaaaacgctcgttatccggccaattacttcgagaaacctagtaccaccatggaggttgcgcagcgtttcgctccgcacagccccagtgtagatcaggccgatgagtcaccgcgttcctcacgggcgaccgtggcggtggctgcgttggcggcctgcccatggggcaacccatgggacgcttcaatactaacatggtgtgaagagtctattgagctaattggtagtcctccggcccctgaatgcggctaatcctaactgcggagcagatactcacatgccagtgggcagtctgtcgtaacgggcaactctgcagcggaaccgactactttgggtgtccgtgtttccttttattcttatactggctgcttatggtgacaattgagaaattgttaccatatagctattggattggccatccagtgacaaacagagcgattgtttacctatttgtcggtttcataccgttgaactttagagttttgaagaccctcaacttgattatattattcaactctgtaaa

SEQ ID NO: 147 - DNA, 743 bp, Echovirus E30
  source 1..743: isolate = FDJS03_84; mol_type = genomic DNA
ttaaaacagcctgtgggttggacccacccatagggcccactgggcgctagcacactggtatcacggtacctttgtgcgcctgttttatccacccttccccgaacgaaacttagaagtttgacttaaacggtcaatagaaaacccagtacaccaactgggtcgtgaccaagcacttctgtgaccccggactgagtatcaataagctactcacgtggctgaaggaggaaacgttcgttacccggccaattacttcgagaaacttagtaccaccatgaaggttgcgtagcgtttcgctccacacgaccccagtgtagatcaggtcgatgagtcaccgcgttccccacgggtgaccgtggcggtggctgcgttggcggcctgcccttggggcaacccaagggacgcttcaatactgacatggtgcgaagagtctattgagctaattggtagtcctccggcccctgaatgcggctaatcccaactgcggagcagatacccacatgccagtgggcagtctgtcgtaacgggcaactctgcagcggaaccgactactttgggtgtccgtgtttccttttattcttatactggctgcttatggtgacaattgagagattgttaccatatagctattggattggccatccagtgtctaatagagcaatcatctacctttttgttggatttattccacttgactataaagcactcaaaacacttgaatacattgtaaatcttaacacaacaaa

SEQ ID NO: 148 - DNA, 750 bp, Echovirus 30
  source 1..750: mol_type = genomic DNA; strain = Bastianni
ttaaaacagcctgtgggttgatcccacccacagggcccactgggcgccagcacactggtatcgtggtacctttgtgcgcctgttttataccccctacccccacatgtactctagaagcaaggcaaacctgaccaatagtaggtgtggcacaccagccgcattttggtcaagcacttctgtttccccggaccgagtatcaataagctgctcacgcggctgaaggagaaaccgttcgttacccgaccagctacttcgagaaacctagtaacactatgaacgttgcggagtgtttcgttcagcacttcccccgtgtagatcaggtcgatgagtcaccgcattcctcacgggtgaccgtggcggtggctgcgttggcggcctgcctacgggttcgcccgtaggacgctctaataccgacatggtgtgaagagtccattgagctagctggtagtcctccggcccctgaatgcggctaatcctaactgcggagcaggtgctcacagaccagtgagtagcctgtcgtaacgggcaactctgcagcggaaccgactactttgggtgtttttccttttttcttctcttatattggctgcttatggtgacaattaaagaattgttaccatatagctattggattggccatccggtgacgagcagagccattgtttacctctttgttggatttgtacctttgaaccacaaagtcttgaataccattcatctcattttaaagttcaactcagctaaaagaaa

SEQ ID NO: 149 - DNA, 741 bp, Echovirus 31
  source 1..741: mol_type = genomic DNA; strain = Caldwell
ttaaaacagcctgtgggttgttcccacccacagggcccatgggcgctagcacactggtatcgtggtacctttgtgcgcctgttttatacaccctccccatttgtaacttagaagtaaagcaatattgatcaatagcaagcatggcacaccagccgtgttcagatcaagcacttctgtaaccccggactgagtatcaataggctgccaaagcggctgaaggagaaaacgttcgttaaccggccaactacttcgagaagcccagtatcaccatgaaagttgcagagcgtttcgctcagcactccccccgtgtagattaggtcgatgagtcaccgcatcccccacaggcgactgtggcggtggctgcgttggcggcctacctacggggcaacccgtaggacgctctaatacagacatggtgagaagagcctattgagctagttggtagtcctccggcccctgaatgcggataatcctaactgcggagcatgtgctcgcaatccagcgagaggcatgtcgtaacgggcaactctgcagcggaaccgactactttgggtgtccgtgtttccttttattccttgtttggctgcttatggtgacaattgaaagattgttgccatatagctattgggtcggccacctggtatctaacagagcaattatttacttgtttgttggttttgtacccttaaatctcaaggttcttgaaacccttaactacacattgaaactcaattcattgaa

SEQ ID NO: 150 - DNA, 732 bp, Echovirus 32
  source 1..732: mol_type = genomic DNA; strain = PR-10
tgtgggttgttcccacccacagggcccactgggcgctagtacactggtaccaaggtacctttgtacgcctgttttataccccctccccgatccgaaacttagaagtaaagcaaacccgatcaatagtaggtgcgacactccagtcgtatctcgatcaagcacttctgtttccccggactgagtatcaatagactgcccacgcggttgaaggagaaaacgtccgtcatccggctaactacttcgagaaacccagtagcaccatggaagttgcagagtgtttcgctcagcactaaccccgtgtagatcaggctgatgagtcaccgcattccccacgggtgaccgtggcggtggctgcgttggcggcctgcctatggggcaacccataggacgctctaatacggacatggtgtgaagagtctattgagctagttagtaatcctccggcccctgaatgcggctaatcctaactgcggagcacatactcctactccaaggagcagtgtgtcgtaacgggcaactctgcagcggaaccgactactttgggtgtccgtgtttcctattaacatatcactggctgcttatggtgacaattgaaagattgttaccatatagctattggattggccatccggtgtcaaacagagcaatagtgtacctattcgctgggtttatcccattgactgttaaagatatacaaactctctacttgataatacaactaaacactgtaaa

SEQ ID NO: 151 - DNA, 743 bp, Echovirus E33
  source 1..743: mol_type = genomic DNA; strain = YNK35/CHN/2013
ttaaaacagcctgtgggttgttcccacccacagggcccacgtggcgttagcacactggtatcccggtacctttgtgcgcctgttttatacaccccaaaccccaatgtaaattagaagaaaataacaccgatcaatagtgggtgtggcacaacagccacatcatgatcaagcactactgttcccccggactgagtatcaataagctgctcgcgcggctgaaggagaaaacgttcgttatccggccaattacttcgagaaacctagtaccaccatgaaggttgcgcagtgtttcgctccacacaaccccagtgtagatcaggtcgatgagtcaccgcattccccacaggcgactgtggcggtggctgcgctggcggcctgcccatggggtgacccatgggacgcttcaatactgacatggtgtgaagagtctattgagctaattggtagtcctccggcccctgaatgcggctaatcctaactgcggagcagatacccacgcaccagtgggtagtctgtcgtaacgggtaactctgcagtggaaccgactactttgggtgtccgtgtttccttttattctcacattggctgcttatggtgacaattgaaagattgttaccatatagctactggattggccatccggtgacaaacagagcaattgtgttcctcttcgatgggttcatacctctcaacaagatcagctttcgaactttgtgctacatcatcaagctaaacacaacaaa

SEQ ID NO: 152 - DNA, 743 bp, Echovirus E33
  source 1..743: mol_type = genomic DNA; strain = YNA12/CHN/2013
ttaaaacagcctgtgggttgttcccacccacagggcccacgtggcgttagcacactggtatcccggtacctttgtgcgcctgttttatacaccccaaaccccaatgtaacttagaagaaaataacaccgatcaatagtgggtgtggcacaccagccacatcatgatcaagcactactgttcccccggactgagtatcaataagctgctcgcgcggctgaaggagaaaacgttcgttatccggccaattacttcgagaaacctagtaccaccatgaaggttgcgcagtgttttgctccacacaaccccagtgtagatcaggtcgatgagtcaccgcattccccacaggcgactgtggcggtggctgcgctggcggcctgcccatggggtgacccatgggacgcttcaatactgacatggtgtgaagagtctattgagctaattggtagtcctccggcccctgaatgcggctaatcctaactgcggagcagatacccacgcaccagtgggcagtctgtcgtaacgggtaactctgcagcggaaccgactactttgggtgtccgtgtttccttttattctcacattggctgcttatggtgacaattgaaagattgttaccatatagctactggattggccatccggtgacaaacagagcaattgtgttcctcttcgttgggttcatacctctcaacaagatcagctttcgaactttgtgctacatcatcaagctaaacacaacaaa

SEQ ID NO: 153 - DNA, 747 bp, Human poliovirus 1
  source 1..747: isolate = CHN-Hainan/93-2; mol_type = genomic DNA
ttaaaacagcctgtgggttgtacccacccacagggcccactgggcgctagcactctgattccacggaatctttgtgcgcctgttttataacccttccccccatttcgcaacttagaagcaacgcgcatcactgatcaacagcaggcatggcgttccagccatgtcttgatcaagcactcctgtttccccggactgagtatcaatagactgcttacgcggttgaaggagaaaacgttcgttacccggctaactacttcgagaaacttagtaacgccatcgaagctgcagggtgtttcgctcagcacttcccccgtgtagatcaggccgatgagtcaccgcaatccccacgggcgaccgtggcggtggctgcgttggcggcctgcctatggggcaacccataggacgccctaaagtggacatggtgcgaagagtctattgagctagttagtagtcctccggcccctgaatgcggctaatcctaactgcggagcacataccctcaagccagagggcagtgtgtcgtaacgggtaactctgcagcggaaccgactactttgggtgtccgtgtttccttttattcttactatggctgcttatggtgacaattcaagaattgttaccatatagctattggattggccatccggtgtctaacagagctattgtgtacttatttgttgggtacgttccattatcttacacatcccttaacacattacgttttatcgtgaagctaaatacaagaag

SEQ ID NO: 154 - DNA, 745 bp, Human poliovirus 1
  source 1..745: isolate = RUS39223; mol_type = genomic DNA
ttaaaacagctctggggttgttcccaccccagaggcccacgtggcggctagcactctggtatcacggtacctttgtgcgcctgttttatgtccccgcccccatgtaactttagaagcaatacacggtgttcattaggaggggcacaagccagtgttcctatgaacaagcacttctgtttccccggtgacctcgtataggctgtgcccacggctaaaaacgtgcgatccgttacccgcttgggtacttcgagaagcccagtaccaccttggaatcttcgacgcgttgcgctcagcactctaccccgagtgtagcttaggctgatgagtctgggcattccccactggtgacagtggcccaggctgcgttggcggcctacccattgctcgcgcaatgggacgctagatgtgaacaaggtgtgaagagcctattgagctgcctaagagtcctccggcccctgaatgcggctaatcctaaccacggagcaagcgccttcaacccagggggtggcttgtcgtaacgcgcaagtctgtggcggaaccgactactttgggtgtccgtgtttccctttgtttttattatggctgcttatggtgacaatcattgattgccatcataaagcgaattggattggccatccggtggaagttacatacatcatccatctatttgttggatttgcttcactaacacagttcacaatcaacttggtatatataataatagtgattagagaaaaataccata

SEQ ID NO: 155 - DNA, 743 bp, Human poliovirus 1
  source 1..743: isolate = Pak-1; mol_type = genomic DNA
taaaacagctctggggttgtccccaccccagaggcccacgtggcggctagtactctggtatcgcggtacctttgtacgcctgttttacacccctaccccatgcaactttagaagcaaatcaataagttcaataggggggggtacaaaccagtaccaccacgaacaagcacttctgtaaccccggtgatcttgtataagctgtgcccacggctgaaagcgagtgatccgttatccgcttaggtacttcgagaagcctagtatcaccttggaatcttcgatgcgttgcgctcagcactctatcccgagtgtagcttaggctgatgagtctgggcgttccccaccggcgacggtggcccaggctgcgttggcggcctacccatggctaacgccatgggacgctagatgtgaacaaggtgtgaagagcctattgagctacttaagagtcctccggcccctgaatgcggctaatcccaaccacggagcaggtgccttcaacccagagggtggcctgtcgtaacgcgcaagtctgtggcggaaccgactactttgggtgtccgtgtttccttttatcttttatatggctgcttatggtgacaatcatagattgttatcataaagtgacttggattggccatccggtaaaatacaaacacatcatctacttgtttgttggatttaccccactcacccaatttactcccagcataacatccattgtttgttaacaagatactgctaccaca

SEQ ID NO: 156 - DNA, 745 bp, Human poliovirus 1
  source 1..745: isolate = TJK35363 clone 6; mol_type = genomic DNA
ttaaaacagctctggggttgttcccaccccagaggcccacgtggcggctagcactctggtatcacggtacctttgtgcgcctgttttatgtccccgcccccatgtaactttagaagcaatacacggtgttcattaggaggggcacaagccagtgttcctatgaacaagcacttctgttcccccggtgacctcgtataggctgtgcccacggctaaaaacgagcgatccgttacccgcttgggtacttcgagaagcctagtaccaccttggaatcttcgacgcgttgcgctcagcactctaccccgagtgtagcttaggctgatgagtctgggcattccccactggtgacagtggcccaggctgcgttggcggcctacccatggctcgcgccatgggacgctagatgtgaacaaggtgtgaagagcctattgagctacctaagagtcctccggcccctgaatgcggccaatcctaaccacggagcaagcgccttcaacccagggggtggcttgtcgtaacgcgcaagtctgtggcggaaccgactactttgggtgtccgtgtttccctttatttttactatggctgcttatggtgacaatcattgattgccatcataaagcgaattggattggccatccggtggaagttatatacatcatctatctatttgttggatttgcttcactaacacagttcacaatcaacttggtatatataataatagtgattagagaaaaataccata

SEQ ID NO: 157 - DNA, 554 bp, Human poliovirus 1
  source 1..554: mol_type = genomic DNA; strain = 3788ALB96
gtataggctgtactcacggctgaaaacaaacgatccgttatccgcttaggtacttcgagaagcctagtaccatcttggaatcttcgacgcgttgcgctcagcactctaccccgagtgtagcttaggctgatgagtctgggcgttccccaccggtgacggtggcccaggctgcgttggcggcctacccatggctcacgccatgggacgctagttgtgaacaaggtgtgaagagcctattgagctacctaagagtcctccggcccctgaatgcggctaatcctaaccacggagcaagtgccttcagcccagaaggtagcttgtcgtaacgcgcaagtctgtggcggaaccgactactttgggtgtcccgtgtttccccttattttcattgtggctgcttgcgggactataattgattgccatcataaagcgatttggattggccatccggagaaagttaaacacgttgtttatttattcgttggattcacctcattaacccaaattacacccagcttgatatatatagtgttgccgactagacaaaatcaccacca

SEQ ID NO: 158 - DNA, 744 bp, Human poliovirus 1
  source 1..744: isolate = CHN15115/Xinjiang/CHN/2011; mol_type = genomic DNA
tttaaacagctctggggttgttcccaccccagaggcccacgtggcggctagtactctggtatcgcggtacctttgtacgcctgttttatacccctaccccatgtaactttagaagcagttcaacaagttcaatagggggggtgcaaaccagcaccaccacgaacaagcacttctgtaaccccggtgaccttgtataagctgtgcccacggctgaaagcgagtgatccgttatccgcttaagtacttcgagaagcttagtatcaccttggaatcttcgatgcgttgcgctcagcactctatcccgagtgtagcttaggctgatgagtctgggcgttccccaccggcgacggtggcccaggctgcgttggcggcctacccatggctaacgccatgggacgctagatgtgaacaaggtgtgaagagcctattgagctacttaagagtcctccggcccctgaatgcggctaatcccaaccacggagcaggtgccttcaacccagagggcggcctgtcgtaacgcgcaagtctgtggcggaaccgactactttgggtgtccgtgtttccttttatcttttatatggctgcttatggtgacaatcatagattgttatcataaagcgacttggattggccatccggtaaaatacaaacacatcatctacttgtttgttggatttactccactcacccaatttactcccagcataatatccattgttttgttaacaagacattgctatcacg

SEQ ID NO: 159 - DNA, 737 bp, Human poliovirus 1
  source 1..737: isolate = 29690_c1; mol_type = genomic DNA
acagctctggggttgcacccaccccagaggcccacgtggcggctagtactccggtattgcggtacccttgtacgcctgttttatactcccttcccgtaacttagacgcacaaaaccaagttcaatagaagggggtacaaaccagtaccaccacgaacaagcacttctgtttccccggtgatgttgtatagactgcttgcgtggttgaaagcgacggatccgttatccgcttatgtacttcgagaagcccagtaccacctcggaatcttcgatgcgttgcgctcagcactcaaccccagagtgtagcttaggctgatgagtctggacatccctcaccggtgacggtggtccaggctgcgttggcggcctacctatggctaacgccatgggacgctagttgtgaacaaggtgtgaagagcctattgagctacataagaatcctccggcccctgaatgcggctaatcccaacctcggagcaggtggtcacaaaccagtgattggcctgtcgtaacgcgcaagtccgtggcggaaccgactactttgggtgtccgtgtttccttttattttattgtggctgcttatggtgacaatcacagattgttatcataaagcgaattggattggccatccggtgaaagtgagatttattatctatctgtttgctggattcgctccattaagtgtgtttactctaagtataatttcaacagttatttcaatcagacaattgtatcata

SEQ ID NO: 160 - DNA, 713 bp, Human poliovirus 1
  source 1..713: mol_type = genomic DNA; strain = NIE1018316
cagaggcccacgtggcggctagtactccggtattgcggtacccttgtacgcctgttttatactcccttcccgtaacttagacgcacaaaaccaagttcaatagaagggggtacaaaccagtaccaccacgaacaagcacttctgtttccccggtgatgttgtatagactgcttgcgtggttgaaagcgacggatccgttatccgcttatgtacttcgagaagcccagtaccacctcggaatcttcgatgcgttgcgctcagcactcaaccccagagtgtagcttaggctgatgagtctggacatccctcaccggtgacggtggtccaggctgcgttggcggcctacctatggctaacgccatgggacgctagttgtgaacaaggtgtgaagagcctattgagctacataagaatcctccggcccctgaatgcggctaatcccaacctcggggcaggtggtcacaaaccagtgattggcctgtcgtaacgcgcaagtccgtggcggaaccgactactttgggtgtccgtgtttccttttattttaatgtggctgcttatggtgacaatcacagattgttatcataaagcgaattggattggccatccggtgaaagtgagattcattatctatctgtttgctggattcgctccattgagtgtgtttactctaagtacaatttcaacagttatttcaatcagacaattgtatcata

SEQ ID NO: 161 - DNA, 744 bp, Human poliovirus 1
  source 1..744: isolate = EGY1218587; mol_type = genomic DNA
ttaaaacagctctggggttgttcccaccccagaggcccacgtggcggctagtactctggtatcgcggtacctttgtacgcctgttttatacccccaccccatgtaactttagaagcagttcaacaagttcaatagggggggtgcaaaccagcaccaccacgaacaagcacttctgtaaccccggtaaccttgtataagctgtacccacggctgaaagcgagtgatccgttatccgcttaagtacttcgagaagcctagtatcaccttagaatcttcgatgcgttgcgctcagcactctatcccgagtgtagcttaggctgatgagtctgggcgttcctcaccggcgacggtggcccaggctgcgttggcggcctacccatggctaacgccatgggacgctagatgtgracaaggtgtgaagagcctattgagctacttaagagtcctccggcccctgaatgcggctaatcccaaccacggagcaggtgccttcaacccagagggtggcctgtcgtaacgcgcaagtctgtggcggaaccgactactttgggtgtccgtgtttccttttatcttttatatggctgcttatggtgacaatcatagattgttatcataaagcgacttggattggccatccggtaaaatacaaacacatcatttacttgtttgttggatttactccactctcccaatttactcctagcataatatccattgttttgttaacaagacattactatcaca

SEQ ID NO: 162 - DNA, 747 bp, Human poliovirus 1
  source 1..747: isolate = 558/BRA-PE/88; mol_type = genomic DNA
ttaaaacagctctggggttgttcccaccccagaggcccacgtggtggccagtactctggtattacggtacctttgtacgcctgttttatactcccttcccctgtaacttagaagcaatctaacctagttcaataggagggggtacaaaccagtaccactacgaacaagcacttctgttaccccggtgaagttgtatagactgtgcccacggtcgaaaatgactgatccgttatccgctcatgtacttcgggaagcctagtaccatcttcggatcttcgatgcgttgcgctcagcactcgaccccagagtgtagcttaggtcgatgagtctggacaatcctcactggcgacagtggtccaggctgcgttggcggcctacctgtggtccaaagccacaggacgctagttgtgaacaaggtgtgaagagcctactgagctacttgagagtcctccggcccctgaatgcggctaatcccaaccacggagcaagtagttgcaaaccagcaaccagcttgtcgtaacgcgtaagtctgtggcggaaccgactactttgggtgtccgtgtttccttttatttttacactggctgcttatggtgacaatcatagattgttatcataaggcgaattggattggccacccggtgtaagtcagatcaattgtctactcgtttgttggatatactccaataacgcactacactcttgagcttaacagagttgttctgctggcgagaagttgctatcgca

SEQ ID NO: 163 - DNA, 744 bp, Human poliovirus 2
  source 1..744: isolate = Env2008_E2450; mol_type = genomic DNA
ttaaaaccagctgtgggttgttcccaccccagaggcccacgcggcggctagcactccggtattacggtacccttgtgcgcctgttttatactcccttcccccgcaatttagaagcatgaaaccaggttcaatagtaaggggtacaaaccagtaccactatgaacaagcacttctgtctccccggtgatattgcatagactgctcacgcggttgaaagcgattgatccgtcatccgcttgtgtacttcgagaagcctagtatcaccttcggaacttcgacgcgttgcgctcagcacccgaccccggggtgtagcttgggctgatgagtctggacgctcctcaccggcgacggtggtccaggctgcgttggcggcctacccgtggttaccaccgcgggacgctacaagtgaacaaggtgtgaagagcctattgagctacacaagagtcctccggcccctgaatgcggctaatcccaaccacggagcaggcggtcacgaacagtggctggcttgtcgtaacgcgcaagtctgtggcggaaccgactactttgggtgtccgtgtttcctgttatttttatcatggctgcttatggtgacaatcgttgattgttatcataaagcgaattggattggccgtccggaaagtgttgtgtcgcatatactgtttagtgaagctactacattaattcaatctctcactcggttagtcaaacagagctcagatagagtaaaacatcattaacgcg

SEQ ID NO: 164 - DNA, 747 bp, Human poliovirus 2
  source 1..747: mol_type = genomic DNA; strain = CHA1218985
ttaaaacagctctggggttgttcccaccccagaggcccacgtggcggccagtactccggtattacggtacccttgtacgcctgttttatactcccttcccctgtaacttagaagcatacaaaccaagttcaatagaagggggtacaaaccagtaccaccacgaacaagcactcctgtttccccggtgacattgcatagactgtacccacggctgaaagcgatcgatccgttacccgctcctgtacttcgagaagcctagtatcatcttggaatcttcgatgcgttgcgctcagcactcaaccccagagtgtagcttaggctgatgagtctggacgtcccccaccggcgacggtggtccaggctgcgttggcggcctacctgtggcccaaagccacaggacgctagttgtgaacaaggtgtgaagagcctattgagctacaagagagtcctccggcccctgaatgcggctaatcctaaccacggagcaggcagttgcaaaccagcaaccggcctgtcgtaacgcgcaagtctgtggcggaaccgactactttgggtgtccgtgtttccttttatttttacaatggctgcttatggtgacaatcatagattgttatcataaagcgacttggattggccatccggtgaaagtaaaacacattgtttacttgtttgttggattcactccaattaactcttttacttacaaactcattacaacaactctattaattagagataagcatcaca

SEQ ID NO: 165 - DNA, 745 bp, Human poliovirus 2
  source 1..745: isolate = Env2008_E3218; mol_type = genomic DNA
ttaaaacagctctggggttgttcccaccccagaggcccacgtggcggctagcactccggtattacggtacccttgtgcgcctgttttatactcccttcccccgcaatttagaagcatgaaacccggttcaatagtaaggggtacaaaccagtaccactatgaacaagcacttctgtctccccggtgatattgtatagactgctcacgcggttgaaagcgattgatccgttatccgcttgtgtacttcgagaagcctagtaccaccttcggaacttcgacgcgttgcgctcagcacccgaccccggggtgtagcttgggctgatgagtctggacgatcctcaccggcgacggtggtccaggctgcgttggcggcctacccgtggttcacaccacgggacgctacaagtgaacaaggtgtgaagagcctattgagctacacaagagtcctccggcccctgaatgcggctaatcccaaccacggagcaggcggtcacgaaccagtggctagcttgtcgtaacgcgcaagtctgtggcggaaccgactactttgggtgtccgtgtttcctgttatttttatcatggctgcttatggtgacaatcattgattgttatcataaagcgaattggattggccgtccggaaagtgttttatcacatatactgtttggtgaagctactacattaattctgcctctcactcggttagtcaaacagaactcagacagagtaaaacatcaccaacgca

SEQ ID NO: 166 - DNA, 712 bp, Human poliovirus 2
  source 1..712: mol_type = genomic DNA; strain = MAD-2593-11
cccacgtggcggccagtactccggtatcacggtacccttgtacgcctgttttatactcccttcccccgtaacttagaagcaatgaaaccaagttcaatagaagggggtacaaaccagtaccaccacgaacaagcacttctgtttccccggtgacgttgcatagactgtccccacggttgaaggcggctgatccgttatccgcttgtgtacttcgagaagcctagtaccatcttggaatctccgatgcgttgcgctcagcactcaaccccagagtgtagcttaggctgatgagtctggacattccccaccggcgacggtggtccaggctgcgttggcggcctacctgtggtccaaaaccacaggacgctagttgtgaacaaggtgtgaagagcctattgagctacatgagagtcctccggcccctgaatgcggctaatcccaaccacggagcaggtgtttgcaatccagcaaatagcctgtcgtaacgcgcaagtctgtggcggaaccgactactttgggtgtccgtgtttccttttattttcatactggctgcttatggtgacaatctcggattgttatcatagagcaaattggattggccatccggtgaaaatcagattgattatttaactttttgttggatttacatctttgacatcacatactccgaatctcattaagatagtgctcttgatacgacatcatcgtcatt

SEQ ID NO: 167 - DNA, 748 bp, Human poliovirus 3
  source 1..748: mol_type = genomic DNA; strain = PAK1019536
tggggttaaaacagctctggggttgttcccaccccagaggcccacgtggcggctagtactctggtatcatggtacctttgtacgcctgttttatacccctaccccacgtaactttagaagcaactcaacaagttcaatagggggggtacaaaccagtaccaccacgaacaagcactcctgttaccccggtgatcttgcataagctgtgcccacggctgaaggcgagagatccgttatccgcttgagtacttcgagaagcctagtatcaccttgggatcttcgacgcgttgcgctcagcactccacccgagtgtagcttaggctgatgagcctgggcattccccaccggcgacggtggcccaggctgcgttggcggcctacccatggctaacaccatgggacgctagatgtgaacaaggtgtgaagagcctattgagctactcaagagtcctccggcccctgaatgcggctaatcccaaccacggagcaggtgtcttcaacccagaaggtagcctgtcgtaacgcgtaagtctgtggcggaaccgactactttgggtgtccgtgtttccttttatcttttatatggctgcttatggtgacaatcacagattgttatcataaagcgatttggattggccatccggtgaagtacaaacacattatctacttgtttgttggatttactccactcacacaccccacccccaatataacatctattgttttgttaacaagaaattactttcgaa

SEQ ID NO: 168 - DNA, 729 bp, Human poliovirus 3
  source 1..729: isolate = Env08_E2886; mol_type = genomic DNA
ttaaaaacagctctggggttgttcccaccccagaggcccacgtggcggctagtactctggtattacggtacctttgtacgcctgttttatatcccctttcccctgtaactcagaagcatgaagtttaagctcaacaggaggggtgcaaaccagcacctctacgagcaagcactactgtttccccggtgaagttacatagactgttcccacggttgaaagtgattgatccgttatccgctcatgtacttcgagaagcctagtatcgctctggaatcttcgatgcgttgcgctcaacactcgaccccggagtgtagcttaggccgatgagtctggacattccccactggcgacagtggtccaggctgcgttggcggcctacctgtggtccaaagccacaggacgctagttgtgaacagggtgtgaagagcctattgagctgcatgagagtcctccggcccctgaatgcggataatcctaaccatggagcaggcaactgcaacccagcagtcagcctgtcgtaacgcgtaagtccgtggcggaaccgactactttgggtgtccgtgtttccttttatttttgaatggctgcttatggtgacaatcacagattgttatcataaagcaaattggattggccatccagtgaatcactaccgagtttgttaaatctatttcagagacacacaactcctcaacgcactatacctaaacagaggattatactacagcg

SEQ ID NO: 169 - DNA, 746 bp, Human poliovirus 3
  source 1..746: mol_type = genomic DNA; strain = SWI10947
ttaaaacagctctggggttgttcccaccccagaggcccacgtggcggctagtactccggtatcacggtacccttgtacgcctgttttatactcccttccccgtaacttagaagtatacaaaccaagttcaatagaagggggtacaaaccagtaccaccacgaacaagcacttctgtttccccggtgaagttgcatagattgtccccacggtcgaaagcgactgatccgttatccgctcttgtacttcgggaagcctagtatcaccttcggatcttcgatgcgttgcgctcagcactcaaccccagagtgtagcttaggtcgatgagtctggacgaacctcactggtgacagtggtccaggctgcgttggcggcctacctgtggcccaaagccacaggacgctagttgtgaacaaggtgtgaagagcctactgagctacatgagagtcctccggcccctgaatgcggctaatcccaaccacggagcaggtggtcacaaaccagtggtttgcctgtcgtaacgcgaaagtctgtggcggaaccgactactttgggtgtccgtgtttccttttattcttattatggctgcttatggtgacaatcttagattgttatcataaagcgaattggattggccatccggggaaaattaagcatatcatacacttgtttgttggattcacccctctgattacacatactcttggcttgattaggattgttgcattgataagacactattgttgca

SEQ ID NO: 170 - DNA, 732 bp, Human poliovirus 3
  source 1..732: mol_type = genomic DNA; strain = FIN84-2493
gggttgttcccaccccagaggcctacgtggcggctagtactccggtatcacggtacccttgtacgcctgttttatactcccttccccgtaacttagaagtaaacaagccaagttcaatagaagggggtacaaaccagtaccaccacgaacaagcacttctgtttccccggtgaagttgcatagattgttcccacggtcgaaagcgactgatccgttacccgctcatgtacttcgggaagcctagtatcaccttcggatcttcgatgcgttgcgctcagcactcaaccccagagtgtagcttaggtcgatgagtctggacaaacctcactggcgacagtggtccaggctgcgttggcggcctacctgtggcccaaagtcacaggacgctagttgtgaacaaggtgtgaagagcctactgagctacatgagagtcctccggcccctgaatgcggctaatctcaaccacggagcaggtagtcacaaaccagtgacttgcctgtcgtaacgcgaaagtctgtggcggaaccgactactttgggtgtccgtgtttccttttattctcattatggctgcttatggtgacaatcctagattgttatcataaagcgagttggattggccatccggtgaaaatcaagcacatcatatacttgtttgttgggtataaccctctgattgcacgcactcttggcttggttaggattattgtgtggaaaaggcaccatagttaca

SEQ ID NO: 171 - DNA, 747 bp, Human poliovirus 3
  source 1..747: mol_type = genomic DNA; strain = USOL-D-bac
ttaaaacagctctggggttgctcccaccccagaggcccacgtggcggccagtactctggtattgcggtacctttgtacgcctgttttatactccctccccccgtgcaactttagaagaaatccacaaagttcaatagagggggtgcaaaccagcaccaccacgaacaagcacttctgtttccccggtgatgtcgtataagctgtacccacggctgaaggcgacggatccgttatccgcttgagtacttcgagaagcctagtattaccttggaatcttcgacgcgttgcgctcagcactctaccccgagtgtagcttaggtcgatgagtctgggcacgccccaccggcgacggtggcccaggctgcgttggcggcctacccatggctatcaccatgggacgctagttgtgaacaaggtgtgaagagcctattgagctacccaagagtcctccggcccctgaatgcggctaatcctaaccacggagcaagtgtcctcaacccaggggatggcttgtcgtaacgcgaaagtctgtggcggaaccgactactttgggtgtccgtgtttccttttatttttatgtatggctgcttatggtgacaatcaaaggttgttaccataaagcaatttggattggccatccggtgagaatcaaacatattatctacctgtttgttgggttttcttcttttacttgaacaatacctctaataataactgctatattgtcaataagacattatcatcaca

SEQ ID NO: 172 - DNA, 747 bp, Enterovirus A71; identical to SEQ ID NO: 153
  source 1..747: isolate = 2019-EV-A71-R398; mol_type = genomic DNA

SEQ ID NO: 173 - DNA, 747 bp, Enterovirus A71
  source 1..747: mol_type = genomic DNA; strain = USA/2018-23296
ttaaaacagcctgtgggttgtacccacccacagggcccaccgggcgctagcactctgattccacggaatctttgtgcgcctgttttataacccccctccccacctcgcaacttagaagcaacgcgcatcactgatcaacagcaggcatggcgcgccagccatgtcttgatcaagcacttctgtttccccggactgagtatcaatagactgcttacgcggttgaaggagaaaacgttcgttacccggctaactacttcgagaaacttagtaacaccatcgaagctgcagggtgtttcgctcagcacttcccccgtgtagatcaggccgatgagtcaccgcaatccccacgggcgaccgtggcggtggctgcgttggcggcctgcctatggggcaacccataggacgccctaaagtggacatggtgcgaagagtctattgagctagttagtagtcctccggcccctgaatgcggctaatcctaactgcggagcacataccctcaagccagagggtggtgtgtcgtaacgggtaactctgcagcggaaccgactactttgggtgtccgtgtttccttttattcttactgtggctgcttatggtgacaattcaagagttgttaccatatagctattggattggccatccggtgtctaacagagctattgtgtacttatttgttgggtacgttccattatcttacacatcccttgacacattacattttattgtgaagctaaatacaagaag

SEQ ID NO: 174 - DNA, 724 bp, Enterovirus A71
  source 1..724: mol_type = genomic DNA; strain = 16L
ccgcccacagggcccactgggcgctagcactctgattccacggaatctttgtgcgcctgttttatamyyytctcccctatttcgcaacttagaagcaacgcgcatcactgatcaacagcaggcatggcgctccagccatgtcttgatcaagcactcctgtttccccggaccgagtatcaatagactgcttacgcggttgaaggagaaaacgttcgttayccggctaactacttcgagaaacttagtaacaccatcgaagctgcagggtgtttcgctcagcacttcccccgtgtagatcaggccgatgagtcaccgcaatccccacgggcgaccgtggcggtggctgcgttggcggcctgcctatggggcaacccataggacgccctaaagtggacatggygcgaagagtctattgagctagttagtagtcctccggcccctgaatgcggctaatcctaactgcggagmwcrkamsctcaagccagagggtagtgtgtcgtaacgggcaactctgcagcggaaccgactactttgggtgtccgtgtttccttttattcttactgtggctgcttatggtgacaattcaagaattgttaccatatagctattggattggccatccggtgtctaacagagctattgtgtacttatttgttgggtacgttccattatcttacacatcccttaacacattacattttattgtgaagctaaatacaagaag

SEQ ID NO: 175 - DNA, 756 bp, Enterovirus A76
  source 1..756: mol_type = genomic DNA; strain = 10-3291-2
cagacgtgtgctcttcccgatgtgggttgtacccacccacagggcccaatgggcgctagcacaccggtatcacggtacccttgtgcgcctgttttatgcaccctccccctatgtaacttagaagaaacaaacacacgatcaatagtaggcttggcgcgccagctaagtcttgatcaagcacttctgttaccccggactgagtatcaataggctgtacccacggctgaaagagaaaacgttcgttacccggctatctacttcgggaaacctagtaccatcatgaagactgcaaagcgtttcgctcagcacaaccccagtgtagatcaggtcgatgagtcactgcattcctcacaggcgactgtggcagtggctgcgttggcggcctgcctatggggaaacccataggacgctttaatgttgacatggtgcgaagagtctactgagctaggtagtagtcctccggcccctgaatgcggctaatcccaaccacggagcaagcgctcacaatccagtgagtagcttgtcgtaatgcgaaagtctgtggcggaaccgactactttgggtgtccgtgtttccttttatttttatcatggctgcttatggtgacaatctaagattgttatcatatagctattggattggccatccggtgaactctagagatattatctatttgtttgttggttttaccaagttaaacatcactagttacaccaccttactttatattatactactgaataatagaaaaagaaa

SEQ ID NO: 176 - DNA, 747 bp, Human enterovirus A76
  source 1..747: mol_type = genomic DNA; note = Accession: AY697458
tttaaaacagcctgtgggttgtacccacccacagggcccactgggcgctagcacaccggtattacggtacccttgtgcgcctgttttatataccctcccccttgtaacttagaagaaacaaataaacgatcaatagtaggcttagcgcaccagctaagtcttgatcaagcacctctgttaccccggactgagtatcaataagctgtacccacggctgaaagagaaaacgttcgttatccggctatctacttcgggaaacctagtaccatcatgaagattgcaaagcgtttcgctcagcacaaccccagtgtagatcaggtcgatgagtcactgcattccccacaggcgactgtggcagtggctgcgttggcggcctgcctacggggaaacccgtaggacgctttaatgttaacatggtgcgaagagtctactgagctaggtagtagtcctccggcccctgaatgcggctaatcctaaccacggagcaggtgctcacactccagtgagtggcctgtcgtaacgcgcaagtctgtggcggaaccgactactttgggtgtccgtgtttccttttatttttatcatggctgcttatggtgacaatctaagattgttatcatatagctattggattggccatccggtgaactctagagatattatttacttgtttgttggttttatcaagttaaatatcaccagttacaccactctcctttacattgtactactgaacaatagaaagagaaa

SEQ ID NO: 177 - DNA, 747 bp, Enterovirus A89
  source 1..747: mol_type = genomic DNA; strain = KSYPH-TRMH22F/XJ/CHN/2011
ttaaaacagcctgtgggttgtacccacccacagggcccactgggcgctagcacactggtatcacggtacctttgtgcgcctgttttatgcaccctttttccctgtaactcagaagaaacaaacaaacgatcaatagtgggcttagcgctccagctaagtcttgatcaagcacttctgttaccccggaccgagtatcaataggctgtacccacggctgaaagagaaaacgttcgttatccggctatctacttcgggaaacctagtaccatcatgaagattgcaaagcgtttcgctcagcacaaccccagtgtagatcaggtcgatgagtcactgcattccccacaggtgactgtggcagtggctgcgttggcggcctgcctatggggaaacccataggacgctttaatattgacatggtgcgaagagtctactgagctaggtagtagtcctccggcccctgaatgcggctaatcccaaccacggagcaggcgctcacactccagtgagtagcttgtcgtaacgcgaaagtctgtggcggaaccgactactttgggtgtccgtgtttccttttatttttatcatggctgcttatggtgacaatctaagattgttatcatatagctattggattggccatccggtgaattctagagacattatttacttgtttgttggttttaccacactgaacattaccaatcacagaactctcctttacatcttgttgttaaacaatagaaagagaaa

SEQ ID NO: 178 - DNA, 747 bp, Human enterovirus A89
  source 1..747: mol_type = genomic DNA; note = Accession: AY697459.1
ttaaaacagcctctgggttgcacccacccacagggcccactgggcgctagcacactggtatcacggtacctttgtgcgcctgttttatacaccctccccccttgtaacttagaagaaacaaacaaacgatcaatagtaggcttagcactccagctaagtctcgatcaagcacttctgttaccccggaccgagtatcaataggctgtacccacggctgaaagagaaaacgttcgttacccggctatctacttcgggaaacccagtaccatcatgaagattgcaaagcgtttcgctcagcacaaccccagtgtagatcaggtcgatgagtcactgcattccccacaggcgactgtggcagtggctgcgttggcggcctgcctatggggaaacccataggacgctttaatattgacatggtgcgaagagtctactgagctaggtagtagtcctccggcccctgaatgcggctaatcccaaccacggagcaggcgctcacactccagtgagtagcttgtcgtaatgcgaaagtctgtggcggaaccgactactttgggtgtccgtgtttccttttatttttatcatggctgcttatggtgacaatctaagattgttatcatatagctattggattggccatccggtgaattctagagatattatttacttgtttgttggttttaccacattaaacattaccaattacagaactctcctctacatcctgttattgaataatagaaagagaaa

SEQ ID NO: 179 - DNA, 744 bp, Enterovirus A90
  source 1..744: mol_type = genomic DNA; strain = 10-2879-1
aaacagctctagggttgttcccaccctaggggcccacgtggcggctagcactctggtatcacggtacctttgtgcgcctgttttataccccctcccctatgtaacttagaagctattaaataaagttcaatagaagggggtacaaaccagtgccaccacgaacaaacacttctgtttccccggtgaagctacatagactgttcccacggtcgaaagtagcagatccgttatccgctttggtacttcgagaaacctagtatcatcttggaatcttcgatgcgttgcgctcagcactcaaccccagagtgtagcttaggtcgatgagtctggacgatcctcactggcgacagtggtccaggctgcgttggcggcctacctgtggtgaaagccacaggacgctagttgtgaacaaggtgtgaagagtctattgagctaccaaagagtcctccggcccctgaatgcggctaatcccaaccacggagcaagtgctcacaatccagtgagtggcttgtcgtaacgcgcaagtctgtggcggaaccgactactttgggtgtccgtgtttccttttatttttatcatggctgcttatggtgacaatctaagattgttatcatatagctattggattggccatccggtgaccagtagagacattatatacttatttgttggctttgttaaattagacacaactacacttaaatctcttctcttcatcacacaattgaatattagaaaaagaaa

SEQ ID NO: 180 - DNA, 748 bp, Enterovirus A90
  source 1..748: isolate = SCH05F/XJ/CHN/2011; mol_type = genomic DNA
ttaaaacagctctgggggtgttcccaccctagaggcccacgtggcggctagcactctggtatcacggtacctttgtgcgcctgttttatatccctttccccatgcaacttagaagttattaaacaaagttcaatagaagggggtacgaaccagtgccaccacgaacaagcacttctgtttccccggtgaagctgcatagactgtccccacggttgaaagcggcagatccgttatccgctttggtacttcgagaaacccagtaccaccttggaatcttcgatgcgttgcgctcagcactcaaccccagagtgtagcttaggttgatgagtctggacgatcctcactggcgacagtggtccaggctgcgttggcggcctacctgtggtgaaaaccacaggacgctagatgtgaacaaggtgtgaagagtctattgagctaccaaagagtcctccggcccctgaatgcggctaatcctaaccacggagcaagtacccacaaaccagtgggcagcttgtcgtaacgcgcaagtctgtggtggaaccgactactttgggtgtccgtgtttcctttttattttatcatggctgcttatggtgacaatctaagattgttatcatatagctattggattggccatccggtagactaacagagatattatatacctatttgttggttttattagattgaatactatcgcattcaaaactcttctttatatcatacaattgaatagcagaaagagaaa

SEQ ID NO: 181 - DNA, 749 bp, Human enterovirus A90
  source 1..749: isolate = 01336/SD/CHN/EV90; mol_type = genomic DNA
tttaaaacagcctgtgggttgttcccacccacagggcccactgggcgctagcacaccggtatctcggtacccttgtgcgcctgttttatacacccttccccctttgtaacttagaagaaatgaacaaatgatcaataggaggcttagcacaccagctaggtcttgatcaagcacttctgttaccccggactgagtatcaataagctgtatccacggctgaaagagaaaacgttcgttatccggccatttacttcgggaaacctagtaccatcatgaaggttgcaaagcgtttcgctcagcacaaccccagtgtagatcaggtcgatgagtcaccgcattccccacaggcgaccgtggcagtggctgcgttggcggcctgcccatggggcaacccataggacgcttcaatgttgacatggtgtgaagagtctattgagctaagtagtaatcctccggcccctgaatgcggctaatcctaaccacggagcaggcgctcacactccagtgagtggcctgtcgtaacgcgcaagtctgtggcggaaccgactactttgggtgtccgtgtttccttttatttttataatggctgcttatggtgacaatctaagattgttatcatatagctattggattggccatccggtgaattctagagatattatctacttatttgttggttttaccaagtttaatatcactagttataccactctcctttatatcatacaattgaatagtagaaagagaaa

SEQ ID NO: 182 - DNA, 749 bp, Human enterovirus A90
  source 1..749: mol_type = genomic DNA; note = Accession: AB192877.1
tttaaaacagctctagggttgttcccgccctagaggcccacgtggcggctagcactctggtatcacggtacctttgtgcgcctgttttataccccctccccccatgtaacttagaagctattaaacaaagttcaatagaagggggtacaaaccagtaccaccacgaacaagcacttctgtttccccggtgaagctacatggactgttcccacggttgaaagtggcagatccgttatccgctttggtacttcgagaaacctagtatcatcttggaatcttcgacgcgttgcgctcagcactcaaccccagagtgtagcttaggtcgatgagtctggacgatccccactggcgacagtggtccaggctgcgttggcggcctacctgtggcgaaagccacaggacgctagttgtgaacaaggtgtgaagagtctattgagctaccaaagagtcctccggcccctgaatgcggctaatcccaaccacggagcaagtgctcacaaaccagtgagtggcttgtcgtaacgcgcaagtctgtggcggaaccgactactttgggtgtccgtgtttccttttatttttatcatggctgcttatggtgacaatctaagattgttatcatatagctattggattggccatccggtgactaacagagatatcatatatctatttgttggttttgttaagctagacacaactgcattcaattctcttctcttcatcacacaattgaataatagaaagagaaa

SEQ ID NO: 183 - DNA, 748 bp, Human enterovirus A90
  source 1..748: isolate = F950027; mol_type = genomic DNA
tttaaaacagctctagggttgttcccaccctagaggcccaagtggcggctagcactctggtattacggtacctttgtgcgcctgttttatatcccttcccccatgtaacttagaagatattaaacaaagttcaataggagggggtacaaaccagtgccaccacgaacaaacacttctgtttccccggtgaagctacatagactgttcccacggttgaaagtggcagatccgttatccgctttggtacttcgagaaacctagtaccaccttggaatcttcgatgcgttgcgctcagcactcaaccccagagtgtagcttaggtcgatgagtctggacgatcctcactggcgacagtggtccaggctgcgttggcggcctacctgtggcgaaagccacaggacgctagttgtgaacaaggtgtgaagagtctattgagctaccaaagagtcctccggcccctgaatgcggctaatcccaaccacggagcaagtgcccacaaaccagtgggtggcttgtcgtaatgcgtaagtctgtggcggaaccgactactttgggtgtccgtgtttccttttatttttatcatggctgcttatggtgacaatctaagattgttatcatatagctattggattggccatccggtgactaacagagatcttgcatacctgtttgttggttttactaaactagatatagttacatttaaaactcttctttatatcatacagttgaatagtagaaagagaaa

SEQ ID NO: 184 - DNA, 745 bp, Human enterovirus 91
  source 1..745: mol_type = genomic DNA; note = Accession: AY697461.1
ttaaacagctctagggttgttcccaccctagaggcccacgtggcggctagcactctggtatcacggtacctttgtgcgcctgttttatatccctttccccatgtaacttagaagttattaaacaaagttcaatagaagggggtacaaaccagtgccaccacgaacaagcacttctgtttccccggtgaagctgtatagactgtctccacggttgaaaatggcagatccgttacccgctttggtacttcgagaaacctagtatcaccttggaatcttcgatgcgttgcgctcagcactcaaccccagagtgtagcttaggtcgatgagtctggacgatcctcactggtgacagtggtccaggctgcgttggcggcctacctgtggtgaaaaccacaggacgctagttgtgaacaaggtgtgaagagtctattgagctaccaaagagtcctccggcccctgaatgcggctaatcctaaccacggagcaagtgccttcaaaccagtaggtagcttgtcgtaacgcgcaagtctgtggcggaaccgactactttgggtgtccgtgtttccttttattttatcatggctgcttatggtgacaatctaagattgttatcatatagctattggattggccatccggtgactaacagagatctcatatacctttttgttggttttactaaattaaatattaccacgttcaagacacttctccttatcatacaactaaatagtgagaagagaaa

SEQ ID NO: 185 - DNA, 702 bp, Human enterovirus A92
  source 1..702: mol_type = genomic DNA; strain = RJG7
tttaaaacagcctgtgggttgtacccacccacagggcccacgcggcgttagtactctggtatcacggtacctttgtatgcctgttttatctcccttcccccgtaacgttagaagaatgaacaaaagacaattagcaaatccaccaacccaggtgggttttcgtcaagcacttctgtttccccggacctagtaccaataagctgtgcccacggctgaaggggaaaacgttcgttatccggctacctacttcgagaagcctagtaccaccaatgattgtctcaagtgttacgctcagcacaaccccagtgtagttcaggtcgatgagtcaccgaattccccacgggcgaccgtgtcggtggctgcgttggcggcctgcctgcgagtttcactcgcaggacgcttgattcatgacatggtgcgaagagcctattgagctaggcagtagtcctccggcccctgaatgcggctaatcctaaccacggagccatgcgtcacaaaccagtggcgtcatggtcgtaacgagcaattctgtggcggaaccgactactttgggtgtccgtgtttcctgttttatttaccttggctgcttatggtgacaatctagagttgtcatcatatagcgattggattggccatccggatattactttgtgtgatttatctcttgctcgtaagcaattttaaatagtttatagcatcatt

SEQ ID NO: 186 - DNA, 632 bp, Simian enterovirus SV19
  source 1..632: mol_type = genomic DNA; strain = NOLA-2
ggtaccctatcgtcgcctgttttatttcccttcccccgtaacgttagaagaaagtacaattgacaaatagtaaatccaccaacccaggtgggttttcgtcaagcacttctgtttccccggacctagtaccaataagctgtatccacggctgaaggggaaaacgttcgttacccggctacctacttcgagaagcctagtaccatcattgaatgtctcaagtgttacgttcagcacaaccccagtgtagttcaggtcgatgagtcaccgagatccccacgggcgaccgtgtcggtggctgcgttggcggcctgcctgtgagttttgctcacaggacgcttgattcatgacatggtgcgaagagcctattgagctaggtagtagtcctccggcccctgaatgcggctaatcctaaccacggagccatgcgttgcaaaccagcgacgttgtggtcgtaacgagcaattctgtggcggaaccgactactttgggtgtccgtgtttcctgttttacttaccttggctgcttatggtgacaattatatagttgtcatcatatagctattggattggccatccggttatataaaatcacttattacttgctcaagcaattcttatctaatcacagataaa

SEQ ID NO: 187 - DNA, 562 bp, Simian enterovirus SV19
  source 1..562: isolate = cg4006; mol_type = genomic DNA
ccaccaacccaggtgggttttccgtcaagcacttctgtctccccggacttagtaccaataggctgtacccacggccgaaagggaaaacgttcgttacccggctacctacttcgagaagcctagtaacatcattgaatgtctcaagtgttacattcagcacaaccccagtgtagttcaggtcgatgagtcaccgaattccccacgggcgaccgtgtcggtggctgcgttggcggcctgcctgcgggtctcactcgcaggacgcttgattcatgacatggtgcgaagagcctattgagctaggtagtagtcctccggcccctgaatgcggctaatcccaaccacggagccatgcgctacaatccagtggtgttgtggtcgtaacgagtaattctgtggcggaaccgactactttgggtgtccgtgtttcctgttttatttaccttggctgcttatggtgacaatctagagttgtcatcatatagcgattggattggccatccggatatatcttttgtgtgatttacctcttgctaccaagcaattgtcacttgttaataatacc

SEQ ID NO: 188 - DNA, 700 bp, Simian enterovirus SV19
  source 1..700: mol_type = genomic DNA; strain = M19s (P2)
ttaaaacagcctgtgggttgtacccacccgcagggcccactgggcgctagtacactgatatcacggtacctttgtacgcctgttttatctccctacccccatcgtaacttagaagcttaacaatacagatcaatagcctctgcaccaaaccaggtgtggaatgatcaagcatttctgttaccccggacctagtaccaataggctgtgtcaaacggctgaaggggaaaaagttcgttacccggccacctacttcgagaagcctagtagcatcactgaagctgtgaagcgttacgatcagcacaaccccagtgtagttcaggtcgatgagtcactgcattccccacaggcgactgtagcagtggctgcgttggcggcctgcccttggtctctgaccaagggacgctttggagtggatatggtgcgaagagcctattgagctaggtggtagtcctccggcccctgaatgcggctaatcctaaccccggagctggtgcacacaaaccagtgtgtggccagtcgtaatgagcaattctgggatggaaccgactactttgggtgtccgtgtttcctgtttcacttaccttggctgcttatggtgacaattgtatagttgtcatcatatagctattggattggccatccggatattattcttgtgtttatttgtgtaatttgatataatttagaaccctgtataaga

SEQ ID NO: 189 - DNA, 698 bp, Simian enterovirus SV43
  source 1..698: mol_type = genomic DNA; strain = OM112t (P12)
ttaaaacagcctgtgggttgttcccacccacagggcccactgggcgctagtactctggtattacggtacctttgtacgcctgttttacaacccttcccccatgtaacttagaagcaacaaataaacgaccaatagcacactcaccaatccagatgagtgatggtcaagcacttctgttaccccgggcttagtaccaatagactgccatcgcggttgaaggggaaaacgctcgttatccggctctctactgcgagaagcctagtaacgccttagaaatgctcaagcgttgcgctcagcacaaccccagtgtagctcaggtcgatgagtcactgcattccccacgggcgaccgtggcagtggctgcgtttgcggcctgcctacagctctacgctgtaggacgcttgtgtatggacatggtgtgaagagcccattgcgctagggagtagtcctccggcccctgaatgcggctaatcctaaccccggagctggtgcttgtaaaccaacaagtggccagtcgtaatgggcaactctgggatggaaccgactactttgggtgtccgtgtttcctgttttatttaccttggctgcttatggtgacaatctagtgttgttgccatatagcgattggattggccatccggatattgttttagacacttgtgtttgtgagtagatctcttctgacataggatataaca

SEQ ID NO: 190 - DNA, 581 bp, Simian enterovirus SV46
  source 1..581: isolate = cg5400; mol_type = genomic DNA
ggttttcgtcaagcacttctgtttccccggacttagtaccaataggctgtacccacggctgaaagggaaaacgttcgttatccggctacctacttcgagaagcctagtatcatcattgaatgtctcaagtgttacgctcagcacaaccccagtgtagttcaggctgatgagtcaccgaattccccacgggcgaccgtgtcggtggctgcgttggcggcctgcctgcgagtttcactcgcaggacgcttgattcatgacatggtgcgaagagcctattgagctaggtagtagtcctccggcccctgaatgcggctaatcccaaccacggagcatccactgacaaaccagtcagcagggtgtcgtaacgggtaactctgtggcggaaccgactactttgggtgtccgtgtttcctgttttacttactctggctgcttatggtgacaatttacggattgttaccatatagctattggattggccatccggattacaagcaaataatattattgtttgtgggatttcttcccttgaatcacactaattacttcattttattaattgttttaaagttagttgcatc

SEQ ID NO: 191 - DNA, 730 bp, Simian enterovirus SV46
  source 1..730: mol_type = genomic DNA; strain = RNM5
tttaaaacagcctgtgggttgtacccactcacagggcccacgtggcgttagtactctggtatcacggtacctttgtatgcctgttttatctcccttcccccgtaacgttagaagaataaacaaatgacaactagcaaatccaccaacccaggtgggttttcgtcaagcacttctgtttccccggacttagtaccaataggctgtacccacggctgaaggggaaaatgttcgttacccggctacctacttcgaaaagcctagtaccaccaatgattgtctcaagtgttacgttcagcacaaccccagtgtagttcaggccgatgagtcaccgaattccccacgggcgaccgtgtcggtggctgcgttggcggcctgcctgcgggtttcacccgcaggacgcttgattcatgacatggtgcgaagagcctattgagctaggtagtagtcctccggcccctgaatgcggctaatcctaaccacggagcattcactggcaaaccagccagcagaatgtcgtaatgggtaactctgtggcggaaccgactactttgggtgtccgtgtttcctgttttacttattttggctgcttatggtgacaatttacggattgttaccatatagctattggattggccatccggattattgcaatactactatttgtgggatttctccctttgtgttataataactaccccattctaacattagctctcaagtttaatacact

SEQ ID NO: 192 - DNA, 744 bp, Enterovirus B69
  source 1..744: mol_type = genomic DNA; strain = Toluca-1
ttaaaacagcctgtgggttgtacccacccacagggcccactgggcgctagcacactggtatcacggtacctttgtgcgcctgttttataccccctaccccaactttaaacttagaagcaaagcaaacccgatcaatagcagatgtagcaagccagttgcatcttgatcaagtacttctgtctccccggactgagtatcaatagactgctcacgcggttgaaggagaaaacgttcgttacccgaccaactacttcgagaaacctagtaacaccatgaaagtagcagggtgtttcgatcagcacaaccccagtgtagatcaggctgatgagtcaccgcatcccccacgggcgaccgtggcggtggctgcgctggcggcctgcccatggggcaacccatgggacgctctaatatggacatggtgtgaagagtctattgagctagttggtagtcctccggcccctgaatgcggctaatcctaactgcggagcacataccccaaagccaaggggcagtgtgtcgtaacgggcaactctgcagcggaaccgactactttgggtgtccgtgtttccttttattctcaaactggctgcttatggtgacaatctcagagttgttaccatatagctattggattggccatccggtgagcaacagagcaattgtctaccaatttgttggatttattccactcaatctagcggttttcagaacattgaattatattctaaccctcaacaagacgaa

SEQ ID NO: 193 - DNA, 708 bp, Enterovirus B69
  source 1..708: isolate = 15_491; mol_type = genomic DNA
gcccactgggcgttagcactctggtattaaggtacctttgtgcgcctgttttataatcccttcccaacttgcaacttagaagtaacacactatgaccaatagggggcgtggcaaaccagccatgccttggtcaagcacttctgtttccccggactgagtatcaataagctgtccacacggctgaaggagaaaacgtccgttacccggccagttacttcgagaaacctagtaccaccatgaaagttgcgtagcgtttcgctccgcacatccccagtgtagatcaggtcgatgagtcaccgcaatccccacgggcgaccgtggcggtggctgcgctggcggcctgcccatggggcaacccatgggacgctacaatactgacatggtgtgaagagtctattgagctaactggtagtcctccggcccctgaatgcggctaatcctaactgcggagcagatacccacacgccagtgggcagtctgtcgtaacgggcaactctgcagcggaaccgactactttgggtgtccgtgtttccttttattcatattttggctgcttatggtgacaattgagagattgttaccatatagctattggattggccatccggtgacaaacagagctatcatctatcttttcatcggcttcgtaccgctgaaccacaaagtatttaacaccctcaatttagtattggccttcaatatagcaaa

SEQ ID NO: 194 - DNA, 745 bp, Enterovirus B73
  source 1..745: isolate = 088/SD/CHN/04; mol_type = genomic DNA
tttaaaacagcctgtgggttgttcccacccacagggcccactgggcgctagcacactggtatcacggtacctttgtgcgcctgttttatacacccccccctacatcgtaatttagaagtccaagccaaacggtcaatagacaacccagtatgccaactgggtcccgaccaagcacttctgttgccccggaccgagtatcaataagctgcttgcgcggctgaaggagaaagcgttcgttacccggccaattacttcgagaaacccagtaacaccatggaagttgcgtggcgtttcgctccgcacaaccccagtgtagatcaggtcgatgagtcaccgcaaccctcacgggcgaccgtggcggtggctgcgttggcggcctgcccatgggacaacccatgggacgcttcaataccgacatggtgcgaagagtctattgagctaattggtattcctccggcccctgaatgcggctaatcctaactgcggagcagacacccacatgccagtgggcagtctgtcgtaacgggaaactctgcagcggaaccgactactttgggtgaccgtgtttcctattatccttattctggctgcttatggtgacaattgaaagattgttaccatatagctattggattggccatccggtgtctaatagagctattatatacctctttgttggatttataccacttaacaaagtaaactaccagactctgtgctatatcattggattgaacacggtgaa

SEQ ID NO: 195 - DNA, 657 bp, Human enterovirus B73
  source 1..657: isolate = 2776-82; mol_type = genomic DNA
gcggccccctcccccactgtaacttagaagcaatgcataccgatcaacagtgggcgtggcaaaccagccatgtcttgatcaaacacttctgtttccccggactgagtatcaatagactgctcgcgcggttgaaggagaaaacgttcgttatccggccaactacttcgagaagcttaagtaacatcatgaaagttacggagcgtttcgttcagcacatccccagtgtagatcaggccgatgagtcactgctctccccacgggcgaccgtggcagtggctgcgctggcggcctgcccatggggtgacccatgggacgctctaagatggacatggtgcgaagagcctattgagctagttggtagtcctccggcccctgaatgcggctaatcccaactgcggagcatgtgtcttcactccagaagatagcatgtcgtaacgggcaactctgcagcggaaccgactactttgggtgtccgtgtttccttttattcctacactggctgcttatggtgacaattcaagaattgttaccatatagctattggattggccatccggtgagcaatagagcaattatctaccaatttgttggatttgtacccctcgattttacagccattggaacacttaaatacatcttagtactcaacacgacaaa

SEQ ID NO: 196 - DNA, 741 bp, Human enterovirus 74
  source 1..741: mol_type = genomic DNA; strain = Rikaze-136/XZ/CHN/2010
ttaaaacagctctggggttgttcccacccacagggcccactgggcgctagcatactggtatcacggtacctttatgcgcctgttttatccacccctccccaacgtaacctagaagacactcatggatgatcaataggaggctcggcatgccagctgagtctggatcaagcacttctgttgccccggaccgagtatcaataggctgctcacgcggctgaaggagaaaaagttcgttatccggccaattacttcgagaaacccagtaccaccatgaaggttgcgtggcgtttcgctccgcacagccccagtgtagatcaggtcgatgagtcaccgcgttccccacgggcgaccgtggcggtggctgcgttggcggcctgcccatggggtaacccatgggacgcttcaatactgacatggtgcgaagagtctattgagctaattggtagtcctccggcccctgaatgcggctaatcctaactgcggagcagacgtccacaaaccagtgggtggtctgtcgtaacgggcaactctgcagcggaaccgactactttgggtgtccgtgtttcctttattcttatattggctgcttatggtgacaattgagagattgttgccatatagctattggattggccatccggtttgcaatagagcgattatactcctctttgttgggtttgtacctctcaacctcaatagttacaggacattattatacattatccagctgaacacgaaaag

SEQ ID NO: 197 - DNA, 743 bp, Enterovirus B75
  source 1..743: isolate = Y16/XZ/CHN/2007; mol_type = genomic DNA
tttaaaacagctctggggttgttcccacccacagggcccatcgggcgctagcacactggtattacggtacctttgtgcgcctgttttatacgcccttcccccgtgtaacttagaagcacatcctacgcggtcgatagatagctcagcaatccagctgggctctgaccaagcacttctgttaccccggaccgagtatcaataggctgctcacgcggctgaaggagaaaacgttcgttacccggccaattacttcgagaaacctagtaccgccatgaaagttgcgaagcgtttcgctccacacaaccccagtgtagatcaggtcgatgagtcaccgcaatccccacgggcgaccgtggcggtggctgcgttggcggcctgcccatggggcaacccatgggacgcttcaataccgacatggtgcgaagagtctattgagctaattggtagtcctccggcccctgaatgcggctaatcctaactgcggagcagatactcgcaaaccagcgggcagtctgtcgtaacgggtaactctgcagcggaaccgactactttgggtgtccgtgtttccctttattcttatgctggctgcttatggtgacaattgaagaattgttaccatatagctattggattggccatccagtgacaagtagagcgatcatttacctatttgttggctttgtaccattgaattttaaagccttgaaaaccttaaatctcgttatattgctcaacgctacaaa

SEQ ID NO: 198 - DNA, 744 bp, Enterovirus B75
  source 1..744: isolate = 102/SD/CHN/97; mol_type = genomic DNA
tttaaaacagcctgtgggttgtttccacccacagggcccacagggcgctagcactttggtatcacggtacctttgtgcgcctgttttataacccttcccccccacagaaacttagaagcaccacacaccgatcaatagaaagcgtggcgcaccagccatgtcttgatcaagcacttctgtttccccggaccgagtatcaatagactgctcgcgcggtcgaaggagaaaacgtccgttatccggctgactacttcgagaaacccagtaacaccatggaaattgcggagtgtttcgatcagcacatccccagtgtagatcaggtcgatgagtcaccgcattccccacgggtgaccgtggcggtggctgcgttggcggcctgcctacggggcatcccgtaggacgcttcaaaatggacatggtgcgaagagtctattgagctagtcagtagtcctccggcccctgaatgcggctaatcctaactgcggagcgcgcgcctccaacccagggggtagcgcgtcgtaacgggtaactctgcagcggaaccgactactttgggtgtccgtgtttctttttatcattacattggctgcttatggtgacaattgaaaggttgttaccatatagctattggattggccacccggtgtctaatagagcgattgtgtacctttttgttgggtttgtgccactttgtaaaacagcctatcagactttgtgctttatagtcaaactaaatacagcaaa

SEQ ID NO: 199 - DNA, 747 bp, Enterovirus B75
  source 1..747: mol_type = genomic DNA; strain = USA/OK85-10362
tttaaaacagtcctgtgggttgttacccacccacagggcccactgggcgccagcacactggtatcacggtacctttgtgcgcctgttttatatacccttcccctactaagtaacttagaagcaattaaacaaagaccaacagtaagcacagcgcaccagctgtgtttcggtcaagcacttctgttaccccggactgagtatcaataggctactcacgtggctgaaggagaaaacgttcgttacccgaccaattacttcgagaagcctagtaacaccatggaggttgcgcggcgtttcgctccacacaaccccagtgcagatcaggtcgatgagccaccgcattccccacgggcgaccgtggcggtggctgcgttggcggcctgcccatggggcaacccatgggacgcttcaatactgacatggtgcgaagagtctattgagctaattggtagtcctccggcccctgaatgcggctaatcccaactgcggagcagatacccacgcgccagtgggcagtctgtcgtaatgggcaactctgcagcggaaccgactactttgggtgtccgtgtttcctttattcttatactggctgcttatggtgacaattgagagattgttaccatatagctattggattggccatccggtgacgagcagagctattatttacctatttgttggttttataccattgaactataaagttttaaaaaccttaaacttcatcttagtactcaatacagcaaa

SEQ ID NO: 200 - DNA, 749 bp, Human enterovirus B77
  source 1..749: mol_type = genomic DNA; strain = USA/TX97-10394
ttaaaacaggcttgttgggttgttcccacccacaaggcccactgggcgctagcacactggtattccggtacctttgtgcgcctgttttataccccctcccccccccgtaacaaacttagaagcaaagtaaactcgatcaatagccggtgtgacaaaccagtcgcatcttgatcaagcacttctgtctccccggaccgagtatcaataaactgctcacgcggttgaaggagaaagcgttcgttacccgaccaattacttcgaaaaacctagtaccaccatgaaagttgcggggtgtttcgctcagcacaaccccagtgtagatcaggtcgatgagtcaccgcattccccacgggcgaccgtggcggtggctgcgctggcggcctgcctatggggcaacccataggatgctctaaaacggacatggtgcgaagagtctattgagctagttggtagtcctccggcccctgaatgcggctaatcctaactgcggagcaggcacctacaagccagtgggcagcctgtcgtaacgggcaactctgcagcggaaccgactactttgggtgtccgtgtttccttttacctcaattttggctgcttatggtgacaattgaaagattgttaccatatagctattggattggccatccggtgactaacagagctattgtgtaccttttcgttggttttataccactcaccctcgcggaggttaagattttactttatataatacacttgaacacattaaa

SEQ ID NO: 201 - DNA, 742 bp, Human enterovirus B77
  source 1..742: mol_type = genomic DNA; strain = CF496-99
ttaaaacagcctgtgggttgtacccacccacagggcccattgggcgctagcacactggtattccggtacccttgtgcgcctgttttatctacccttccctactgcaacttagaagttaaacagtcacggtcgataggcggttcagtaaaccaactggatcttgaccaagcacttctgttaccccggactgagtatcaataagctgcttacgtggctgaaggagaaaacgttcgttacccggccaattacttcgagaaacctagtaccaccatgaaggttgcgcagcgtttcgctccgcacaaccccagtgtagatcaggtcgatgagtcaccgcactcctcacgggcgaccgtggcggtggctgcgctggcggcctgcccatggggcaacccatgggacgcttcaatactgacatggtgcgaagagtctattgagctaattggtaatcctccggcccctgaatgcggctaatcccaactgcggagcaggtacccacacaccagtgggcagcctgtcgtaacgggcaactctgcagcggaaccgactactttgggtgtccgtgtttccttttattcctatactggctgcttatggtgacaattgaaagattgttaccatatagctattggattggccatccagtgacaaacagagcaattgtctatctatttgtcggttttgtaccaataaatttcaaagtcctaaaaaccctcaatttcatattgttacttaacacaacaag

SEQ ID NO: 202 - DNA, 733 bp, Human enterovirus B79
  source 1..733: mol_type = genomic DNA; strain = 17-2255-1_E79
ctgtgggttgttcccacccacagggcccactgggcgccagcactctgattccacggaatctttgtgcgcctgttttacaaccctccccaatttgtaacgtagaagcaatacacactactgatcaatagtaggcatggcgcgccagtcatgtcatgatcaagcacttctgttccccggactgagtatcaatagactgctcacgcggttgaaggagaaaacgttcgttacccggctaactacttcaagaaacctagtagcaccatggaagctgcggagtgtttcgctcagcacttcccccgtgtagatcaggtcgatgagtcactgcaatccccacgggcgaccgtggcagtggctgcgttggcggcctgcctatggggtaacccataggacgctctaatgtggacatggtgcgaagagtctattgagctagttagtagtcctccggcccctgaatgcggctaatcctaactgcggagcacatgccttcaacccaggaggtggtgtgtcgtaacgggtaactctgcagcggaaccgactactttgggtgtccgtgtttccttttatccttatattggctgcttatggtgacaatcacggaattgttgccatatagctattggattggccatccggtgtctaacagagctattgtatacctatttgttggatttgtaccactaaattacaaggttttaaacactctcaaccttataatactactcaactcagcaaa

SEQ ID NO: 203 - DNA, 733 bp, Human enterovirus B79; identical to SEQ ID NO: 202
  source 1..733: mol_type = genomic DNA; note = Accession: AB426610.1

SEQ ID NO: 204 - DNA, 745 bp, Human enterovirus B79
  source 1..745: mol_type = genomic DNA; strain = USA/CA79-10384
ttaaaacagcctgtgggttgtacccacccacagggcccactgggcgctagcacactggtatcccggtacctttgtgcgcctgttttataccccctcccccatatcgtaacatagaagcaatgcactcccggtcaatagctgacgtgacaaaccagttgcgttttgaccaagcacttctgtaaccccggaccgagtatcaataagctgcttgcgcggctaaaggagaaaccgtccgttacccggctaactacttcgagaaacctagtaccaccatgaacgttgcggagtgtttcgctcagcacttcccccgtgtagatcaggtcgatgagccaccgcattccccacgggcgaccgtggcggtggctgcgttggcggcctgcctgtggggcaacccacaggacgctctaatatagacatggtgtgaagagtctattgagctagttagtagtcctccggcccctgaatgcggctaatcctaactgcggagcacatacccctaatccaaggggcagtgtgtcgtaacgggcgactctgcagcggaaccgactactttgggtgtccgtgtttccttttatcttttatattggctgcttatggtgacaattgcagagttgttaccatatagcttttggattggccatccggtgagcaatagagctgttatttatcaatttgttggattcgtcgcactcaaccacacagtctttagaacactcggatttatcttgacccttaatacgagaaa

SEQ ID NO: 205 - DNA, 742 bp, Enterovirus B80
  source 1..742: isolate = HT-LYKH203F/XJ/CHN/2011; mol_type = genomic DNA
ttaaaacagctctggggttgttcccacccacagggcccaccgggcgccagcactctggtatcacggtacctttgtgcgcctgttttatacccccgtccccggttgtaacttagaagtaacactccacgaccgatagtaggtgtggcacgccagccatgtcttggtcaagcacttctgtttccccggattgagtatcaataggctgttcacacggccgaaggagaaaacatccgttatccggccaactacttcgagaaacctagtaccaccatgaaggttgcgcagtgtttcgctccgcacaaccccagtgtagatcaggccgatgagtcaccgctttccccacgggcgaccgtggcggtggctgcgttggcggcctgcccatggggaaatccatgggacgcttcaatactgacatggtgcgaagagtctattgagctagttggtattcctccggcccctgaatgcggctaatcctaactgcggagcagacacccacatgccagtgggcagtctgtcgtaacgggcaactctgcagcggaaccgactactttgggtgtccgtgtttccttttattcttatactggctgcttatggtgacaattgaaagattgttaccatatagctattggattggccatcctgtgactaacagagctattgtatacctatttgttggttttgtgccactgaattacaaggctttaaacaccctcaactttataatactactcaactcattaaa

SEQ ID NO: 206 - DNA, 742 bp, Human enterovirus B80
  source 1..742: isolate = HZ01/SD/CHN/2004; mol_type = genomic DNA
ttaaaacagcctgtgggttgatcccacccacagggcccactgggcgctagcacactggtatcccggtacctttgtgcgcctgttttatttacccttccccaatgtaatttagaagtttatcccaaatggtcaatagacaacccagcacgccagctgggcttcgaccaagcacttctgttaccccggaccgagtatcaataggctgctcacgcggctgaaagagaaaatgttcgttacccggccaaccacttcgagaaacttagtatcaccatgaaagttgcgcagtgtttcgctccgcacagccccagtgtagatcaggtcgatgagtcaccgcgttccccacgggcgaccgtggcggtggctgcgttggcggcctgcccatggggcaacccatgggacgcttcaatactgacatggtgcgaagagtctattgagctggttggtagtcctccggcccctgaatgcggctaatcctaactgcggagcagatacctacacaccagtgggcagtctgtcgtaacgggcaactctgcggcggaaccgactactttgggtgtccgtgtttccttttattcttatattggctgcttatggtgacaattgaaagattgttaccatatagctattggattggccatccagtgacaaacagagctatcgtgtacctatttgttggttttgtaccactgaaccgtaaggtgttagacactctaaacctcataattctgttcaattcagcaaa

SEQ ID NO: 207 - DNA, 741 bp, Enterovirus B81
  source 1..741: isolate = 99279/XZ/CHN/1999; mol_type = genomic DNA
ttaaaacagctctggggttgctcccacccacagggcccaatgggcgctagcacactagtattgaggtacttttgtgcgcctgttttatccaccctctccccacgtaacttagaagcaaaactcattcggtcaatagacagcccagtaagccaactgggcaatgaccaagcacttctgttccccggactgagtatcaatagactgctcacgcggttgaaggagaaatcgttcgttacccggccaattacttcgagaaacctagtaccaccatggagattgcgaagtgtttcgctccgcacaaccccagtgtagatcaggctgatgagtcaccgcattcctcacgggcgaccgtggcggtggctgcgctggcggcctgcccatggggcaacccatgggacgcttcaatattaacatggtgtgaagagtctattgagctaattggtagtcctccggcccctgaatgcggctaatcctaactgcggagcagacacccacacgccagtgggcagtctgtcgtaacgggaaactctgcagcggaaccgactactttgggtgtccgtgtttccttttattcttatattggctgcttatggtgacaattgaaagattgttaccatatagctattggattggccatccagtgacaaatcgagcgatcatttacttgtttgttggtttcgtcccgctaaactttaaagttgtgaatactcttaactttattatagcacagaacacatcact

SEQ ID NO: 208 - DNA, 739 bp, Human enterovirus B81
  source 1..739: mol_type = genomic DNA; strain = USA/CA68-10389
ttaaaacagcctgtgggttgtacccacccacagggcccattgggcgcttgcacactggtattccggtacctttgtgcgcctgttttatacatcctacccccgtaacttagaagcaagatcacccgatcaccaggaaatgtggcaaaccagtcacattctgatcaagcacttctgtttccccggactgagtatcaataggctgttcacacggctgaaggagaaaacgttcgttacccggccaactacttcgaaaaacctagtatcaccgtgaacgttgcagagtgtttcgctcagcactttccccgtgtagatcaggtcgatgagtcaccgcattccccacgggcgaccgtggcggtggctgcgttggcggcctgcctgcggggcaacccgtaggacgctctaatacagacacggtgtgaagagtctattgagctagttggtagtcctccggcccctgaatgcggctaatcctaactgcggagcgagcgcttgtaatccaacaggtagctcgtcgtaacgggtaactctgcagcggaaccgactactttgggtgaccgtgtttccttttatttcattactggctgcttatggtgacaatcacagagttgttaccatatagctattggattggccatccggtgtcaaatagagcaattgtgtttctttttgttgggtttgtaccacttgacttgaccagctacaacactctgtgctacattgttagattgaacacagcaaa

SEQ ID NO: 209 - DNA, 745 bp, Human enterovirus B82
  source 1..745: mol_type = genomic DNA; strain = USA/CA64-10390
ttaaaacagcctgtgggttgcacccacccgcagggcccactgggcgctagtacactggtaccccggtacccttgtacgcctgttttatttctccctcccccaaccagtaacctagaagtaaagcaaacccgatcaatagcaggtgcgacacaccagtcgtatcttgatcaagcacttctgtaaccccgggccgagtatcaatagactgctcacgcggttgagggagaaaacgctcgttatccggctgactacttcgagaaacccagtaacaccatagaagttgcagagtgtttcgctcagcactttccccgtgtagatcaggtcgatgagtcaccgcattccccacgggtgaccgtggcggtggctgcgttggcggcctgcctatggggcaacccatgggacgctctaatacagacatggtgtgaagagtcaattgagctagtcagtattcctccggcccctgaatgcggctaatcctaactgcggagcacgtgcctccaatccagggggtggcgtgtcgtaacgggtaactctgcagcggaaccgactactttgggtgtccgtgtttccttttattcttatcttggctgcttatggtgacaattgaaggattgttaccatatagctattggattggccatccggtgactaacagagcaatcatataccaatttgttggttttataccattgaattacaaagttctaatcacccttaaattcattttaacacttaatacgtcaaa

SEQ ID NO: 210 - DNA, 742 bp, Human enterovirus B83
  source 1..742: mol_type = genomic DNA; strain = USA/CA76-10392
tttaaaacagcctgtgggttgttcccacccacagggcccactgggcgctagcactctggtatcacggtacccttgtgcgcctgttttatatccccaccccagtggaacattagaagcagcacacctatgatcaatagtgggcgtggcatccagtcacgttatgatcaagcacttctgtgaccccggactgagtatcaatagactgctcacgcggttgaaggagaaaacgttcgttacccggccagttacttcgagaaacccagtaacaccatgaatgttgcagagtgtttcgctcagcacttcccccgtgtagatcaggtcgatgagccactgcattccccacgggcgaccgtggcagtggctgcgttggcggcctgcctatggggtcacccataggacgctctaatactgacatggtgcgaagagtctattgagctaactggtagtcctccggcccctgaatgcggctaatcctaactgtggagcacattcccccaatccagggggcagtgtgtcgtaacgggcaactctgcagcggaaccgactactttgggtgtccgtgtttctttttattctcatattggctgcttatggtgacaattacagaattgttaccatatagctattggattggccatccggtgactaacagagcaattatttatcaattcgttggatttgtcccactcgatttcaaagcagtcaatacactctcatatatcgttacactcaacacaacaaa

SEQ ID NO: 211 - DNA, 744 bp, Enterovirus B83
  source 1..744: isolate = 99245/XZ/CHN/1999; mol_type = genomic DNA
tttaaaacagctctggggttgttcccacctacagggcccattgggcgctagcactctggtatcacggtacccttgtgcgcctgttttacagcccctcccccgaacatgaacttagaagcaccacacaccgatcaacagcgggcgtagcataccagctacgtcttgatcaagcacttctgtttccccggactgagtatcaatagactactaacgtggtcgaaggagaaaacgttcgttacccggccagctacttcgaaaagcctagtatcaccatggaaattgcggagtgtttcgctcagcgcacccccagcgtagatcaggccgatgagtcaccgcgtccctcacgggcgaccgtggcggtggctgcgttggcggcctgcctacggggcaacccgtaggacgcttcaatatggacatggtgcgaagagcccattgagctagttggtagtcctccggcccctgaatgcggctaatcctaactgcggagcgctcgcctccaaaccagggggttgtgcgtcgtaatgggtaactctgcagcggaaccgactactttgggtgtccgtgtttccttttatttttatcatggctgcttatggtgacaattgaaaggttgttaccatatagctattggattggccatccagtgtctaacagagcaattatatacctctttgttggatttgtaccgctaaacaagacaaattatcaaactttgtgccttattgttaaattaaacacaacaag

SEQ ID NO: 212 - DNA, 744 bp, Enterovirus B83
  source 1..744: isolate = AFP341-GD-CHN-2001; mol_type = genomic DNA
tttaaaacagcctgtgggttgttcccacccacagggcccactgggcgctagcactctggtatcacggtacctttgtgcgcctgttttatagcccctcccttagataggaatttagaagcactgcacaccgatcaatagcaggcgcggcacgccagccacgtcttgatcaagcacttctgtttccccggaccgagtatcaatagactgttaacgcggtcgaaggagaaaacgttcgttatccggccaactacttcgagaaacctagtaacgccatggaagttgcggagtgtttcgctcagcacatccccagtgtagatcaggtcgatgagtcaccgcatccctcacgggtgaccgtggcggtggctgcgttggcggcctgcctacggggcaacccgtaggacgcttcaatatggacatggtgcgaagagtatattgagctagttggtagtcctccggcccctgaatgcggctaatcctaactgcggagcgctcgcccccaatccagggggtcgtgcgtcgtaacgggtaactctgcagcggaaccgactactttgggtgtccgtgtttccttttatctttatcacggctgcttatggtgacaattgaaagattgttaccatatagctattggattggccatcctgtgtctaacagagcaatcatatatctttttgttggatttgtgccacttgataaaataagttaccagactttgtgttttatcatcagactaaacacaacaaa

SEQ ID NO: 213 - DNA, 742 bp, Enterovirus B83
  source 1..742: isolate = 246/YN/CHN/08; mol_type = genomic DNA
tttaaaacagcctgtgggttgttcccacccacagggcccactgggcgtaagcacactggtatcacggtacctttgtgcgctgttttatccacccctccccaatgtaacttagaagcactaaatgaatggtcaacagggggcccagcacaccagttgagtcctgaccaagcacttctgtcaccccggactgagtatcaataagctactcacgtggctgaaggagaaaacgttcgttacccggccaattacttcgagaaacttagtaccaccatgaaggttgcgcagcgtttcgctccacacaaccccagtgtagatcaggccgatgagtcaccgcattccccacgggcgaccgtggcggtggctgcgctggcggcctgcccgaggggcaaccctcgggacgcttcaataccgacatggtgcgaagagtctattgagctaattggtagtcctccggcccctgaatgcggctaatcctaactgcggagcagatacccacacgccagtgggcagtctgtcgtaatgggtaactctgcagcggaaccgactactttgggtgtccgtgtttccttttattcttacactggctgcttatggtgacaattgagagattgttaccatatagctattggattggccatccggttagtaacagagcgattgtttacttgtttgttggttttatacccttgaacctcagagtacttgaaacacttgattttataataaaattgaacacaacaaa

SEQ ID NO: 214 - DNA, 726 bp, Enterovirus B84
  source 1..726: mol_type = genomic DNA; strain = GHA:BAR:TES/2017
ggttgttcccacccacagggcccattgggcgctagcacactggtatcacggtacccttgtgcgcctgttttatacacccttccccaacgaaacttagaagtaaagcaacaaggtcaataggtagctcagtgagccaactgagttatgaccaagcacttctgtcaccccggactgagtatcaataggctgctcacgcggctgaaggagaaagcgttcgttatccggctaactacttcgagaaacctagtaccaccatgaaggttgcgtagcgtttcgatcagcacaaccccggtgtagatcaggccgatgagtctccgcattcctcacgggcgaccgtggcggtggctgcgctggcggcctgcccatggggcaacccatgggacgcttcaatactgacatggtgcgaagagtctattgagctagttagtagtcctccggcccctgaatgcggctaatcctaactgcggagcacacacccccaacccaggaggcagtgtgtcgtaacgggtaactctgcagcggaaccgactactttgggtgtccgtgtttccttttattcttatactggctgcttatggtgacaattgagagattgttaccatatagctattggattggccatccggtgactaacagagctattgtatacctgtttgttggttttataccattaaattgcaaagttctagagaccctcaattttatcctattactaaacgcagcaaa

SEQ ID NO: 215 - DNA, 742 bp, Enterovirus B84
  source 1..742: isolate = AFP452/GD/CHN/2004; mol_type = genomic DNA
ttaaaacagcctgtgggttgttcccacccacagggcccactgggcgctagcacactggtatcacggtacccttgtgcgcctgttttatcaaccccttcccgatgtaacttagaagccaaatcttaccggtcaacaggtggtccagtatgccaactgggctctgaccaagcacttctgttaccccggactgagtatcaataggctgctcacgcggctgaaggagaaaatgtccgttacccggccaattacttcgagaaacctagtaccaccatgaaggttgcgcggcgtttcgctccacacaaccccagtgcagatcaggtcgatgagccaccgcttcccccacgggcgaccgtggcggtggctgcgttggcggcctgcccatgggacaacccatgggacgcttcaatactgacatggtgcgaagagtctattgagctaattggtagtcctccggcccctgaatgcggctaatcctaactgtggagcagatgcccgcaagccagcgggtggtctgtcgtaacgggcaactccgcagcggaaccgactactttgggtgaccgtgtttccttttatttttatactggctgcttatggtgacaattgaaagattgttaccatatagctattggattggccatccggtgactaacagagctatcatatatctatttgttggttacgtcccacttgactatagagttctacgcaccttatatttcattttagatctgaacaaagcgag

SEQ ID NO: 216 - DNA, 744 bp, Human enterovirus B84
  source 1..744: isolate = CIV2003-10603; mol_type = genomic DNA
ttaaaacagcctgtgggttgttcccacccacagggcccaccgggcgccagcacactggtatcacggtacccttgtgcgcctgttttatccaccccttcccacagtaacttagaagcacaccatgtatacggtcaataggcggctcagtacaccaactgggccacgaccaagcacttctgttaccccggactgagtatcaataagctgctcacgcggctgaaggagaaaacgttcgttacccggccaattacttcgagaaacccagtaccaccatgaaggttgcgcagcgtttcgttccgcacaaccccagtgtagatcaggtcgatgagtcaccgcgttcctcacgggtgaccgtggcggtggctgcgttggcggcctgcccatggggcaacccatgggacgcttcaatactgacatggtgcgaagagtctattgagctaattggtagtcctccggcccctgaatgcggctaatcctaactgcggagcagatacccacaaaccagtgggcagtctgtcgtaacgggcaactctgcagcggaaccgactactttgggtgtccgtgtttccttttatccttacactggctgcttatggtgacaattgagaaattgttaccatatagctattggattggccatccggtgacaaacagagcagttgtttacctatttgttggtttcgtaccgctgaaccttaaagttctaaagaccctcaattttatcttagcacttaacacagcaaa

SEQ ID NO: 217 - DNA, 744 bp, Human enterovirus B85
  source 1..744: mol_type = genomic DNA; strain = HTPS-MKLH04F/XJ/CHN/2011
ttaaaacagcctgtgggttgttcccacccacagggcccactgggcgctagcacactggtattacggtacctttgtgcgcctgttttatataccccccccaagtgcaacttagaagcaagacatgaccggtcagcaggtgattcagtaaaccaactgagtcttgaccaagcacttctgtttccccggaccgagtatcaataggctgcttacgcggctgaaggagaaagtgttcgttacccggccaattacttcgagaagcctagtaccaccatggaggttgcgcggcgtttcgctccgcacacccccagtgtagatcaggccgatgagccaccgcattccccacgggtgaccgtggcggtggctgcgttggcggcctgcccatggggtaacctatgggacgcttcaatactgacatggtgcgaagagcctattgagctaattggtagtcctccggcccctgaatgcggctaatcctaactgcggagcaggtacccacataccagtgggcagcctgtcgtaacgggtaactctgcagcggaaccgactactttgggtgaccgtgtttccttttattttttcctattggctgcttatggtgacaatcgaggaattgttgccatatagctattggattggccatccggtgtcaaatagagcgattatttacctgtttgttggatttgtaccactgaactttaaggcgctcatcactctcaactatattttatcccttaacgcaacaaa

SEQ ID NO: 218 - DNA, 742 bp, Human enterovirus B85
  source 1..742: mol_type = genomic DNA; strain = BAN00-10353
ttaaaacagcctgtgggttgttcccacccacagggcccaccgggcgctagcacactggtattgcggtacctttgtgcgcctgttttatacacccctccttaatgtaactcagaagtacaacattaccggtcaacagatgactcagtaaaccaactgagcctcgaccaagcacttctgtttccccggaccgagtatcaataggctgctcacgcggctgaaggagaaagtgttcgttacccggccaattacttcgagaagcccagtaccaccatggaggttgcgcggcgtttcgctccgcacatccccagtgtagatcaggctgatgagtcaccgcgttccccacgggtgaccgtggcggtggctgcgctggcggcctgcccatggggtaacccatgggacgcttcaatactgacatggtgtgaagagcctattgagctaattggtagtcctccggcccctgaatgcggctaatcctaactgcggagcagatacccacacaccagcgggcagtctgtcgtaacgggcaactctgcagcggaaccgactactttgggtgtccgtgtttccttttatttttatgctggctgcttatggtgacaattgaggaattgttaccatatagctattggattggccatccagtgtccaacagagcgatcatttacctgttcgttgggttcgtaccactaaaccacaagtcactcagcacacttaattacattataactctcaacacaacaag

SEQ ID NO: 219 - DNA, 742 bp, Human enterovirus B86
  source 1..742: mol_type = genomic DNA; strain = BAN00-10354
ttaaaacagcctgtgggttgtacccacccacagggcccactgggcgctagcacactggtattacggtacccttgtgcgcctgttttatttacccctcccccacgcaacctagaagcatgacttaagcggtcaatagatggctcagtatgccaactgagttatgaccaagcacttctgttaccccggaccgagtatcaataggctgctcacgcggctgaaggagaaagtgttcgttacccggccagttacttcgagaaacctagtatcatcatgaaggttgcgaggcgtttcgctccacacgaccccggtgtagatcaggctgatgagtcaccgcattccccacgggcgaccgtggcggtggctgcgctggcggcctgcccatggggcaacccatgggacgcttcaatattgacatggtgcgaagagtctattgagctaactggtagtcctccggcccctgaatgcggctaatcctaactgcggagcagacacccacatgccagtgggcagtctgtcgtaacgggcaactctgcagcggaaccgactactttgggtgtccgtgtttccttttattcttatattggctgcttatggtgacaattgaaagattgttgccatatagctattggattggccatccagtgactaacagagcaattgtctacctgttcgttggttacgtaccactaaattataaagttttgaacacacttaattttattatagcacttaacaccttaaa

SEQ ID NO: 220 - DNA, 743 bp, Enterovirus B87
  source 1..743: isolate = LY02/SD/CHN/2000; mol_type = genomic DNA
ttaaaacagcctgtgggttgttcccacccacagggcccatagggcgccagcactctggtatcccggtacctttgtgcgcctgttttatccacccttccccaagcgtaacttagaagcccatcatacacggtcaataggtggttcagtatgccaactgagtcttgaccaagcacttctgttaccccggactgagtatcaataagctgctcacgcggctgaaggagaaaacgttcgttatccggccaattacttcgagaaacctagtaacaccatgaaggttgcgcagcgtttcgctccgcacaaccccagtgtagatcaggtcgatgagtcaccgcactccccacgggcgaccgtggcggtggctgcgttggcggcctgcccatggggcaacccatgggacgcttcaatactgacatggtgcgaagagtctattgagataattggtagtcctccggcccctgaatgcggctaatcctaactgcggagcagatacccacatgccagtgggcagtctgtcgtaacgggcaactctgcagcggaaccgactactttgggtgtccgtgtttccttttatttctatactggctgcttatggtgacaattgacagattgttaccatatagctattggattggccatccggtgacgaacagagcaattatttacttatttgttggttttataccattaaatttcaaagttttaaaaaccctcaacttagttttgtcactcaactcagcaaa

SEQ ID NO: 221 - DNA, 743 bp, Enterovirus B88
  source 1..743: mol_type = genomic DNA; strain = 11-4644-1
tgtgctcttccgatctggttgttcccacccacagggcccactgggcgccagcacactggtattacggtacccttgtgcgcctgttttatccacccccccccactgtaacttagaagataaccacacgcggtcaataggtgactcagtacgccaactgggtcgcgaccaagcacttctgttaccccggaccgagtatcaataagctgctcgcgcggctgaaggagaaaacgttcgttacccggccaattacttcgagaaacctagtaccaccatggaggttgcgcagcgtttcgctccgcacaaccccagtgtagatcaggtcgatgagtcaccgcaatccccacaggcgactgtggcggtggctgcgttggcggcctgcccatggggaaacccatgggacgcttcaatatcgacatggtgcgaagagtctattgagctaattggtagtcctccggcccctgaatgcggctaatcctaactgtggagcagatacccacactccagtgggcagtctgtcgtaatgggcaactctgcagcggaaccgactactttgggtgtccgtgtttccttttattcctatgctggctgcttatggtgacaattgacagattgttaccatatagctactggattggccatccggtgacaagcagagcgattgtttacttatttgttggtttcattccactcaattataaagtactaaacacccttaatttcattataactcttaacacgttaaa

SEQ ID NO: 222 - DNA, 744 bp, Human enterovirus B88
  source 1..744: mol_type = genomic DNA; strain = BAN01-10398
ttaaaacagcctgtgggttgatcccacccacagggcccactgggcgctagcacactggtattccggtacttttgtgcgcctgttttatacacccttccccttcatgtaacttagaagtaaaacacaaacggtcaataggtagctcagcaaaccagctgagcctcggccaagcacttctgttaccccggactgagtatcaataagctgttaacacggctgaaggagaaaacgttcgttatccggccaattacttcgagaaacctagtaacaccatgaaggttgcgtagcgtttcgctccacacaaccccagtgtagatcaggtcgatgagtcaccgctctccccacgggtgaccgtggcggtggctgcgttggcggcctgcccatggagcactccatgggacgcttcaatactgacatggtgtgaagagtctattgagctaattggtagtcctccggcccctgaatgcggctaatcctaactgcggagcagacacccacacgccagtgggcagtctgtcgtaatgggcaactctgcagcggaaccgactactttgggtgtccgtgtttccttttattcttacattggctgcttatggtgacaatcaaggaattgttaccatatagctattggattggccatccggtatctaacagagcaattgtttacctcttcaccggttttgtaccattgaattgcaatagtctcaacaccctttgctatatcattaaattgaactcagcaaa

SEQ ID NO: 223 - DNA, 752 bp, Enterovirus B93
  source 1..752: isolate = 99052/XZ/CHN/1999; mol_type = genomic DNA
aaagcaggctttaaaacagctctggggttgttcccacccacagggcccactgggcgctagcactctggtatcacggtacctttgtgcgcctgtttttccacccctccccatacgcaacttagaagagagactcaaccggtcaatagacagcctagtacaccaactaggttctgaccaagaacttctgtttccccggaccgagtatcaataggctgcttacgcggctgaaggagaaaacgttcgttacccggccaattacttcgagaaacctagtatcaccatggaagttgcgcagtgtttcgctccgcacaaccccagtgtagatcaggtcgatgagtcaccgcattccccacaggcgactgtggcggtggctgcgttggcggcctgcccgtggggcaacccacgggacgcttcaataccgacatggtgcgaagagtctattgagctaattggtagtcctccggcccctgaatgcggctaatcctaactgtggagcagatacccacgcgccagtgggcagtctgtcgtaatgggcaactccgcagcggaaccgactactttgggtgtccgtgtttccttttatcctcataatggctgcttatggtgacaattgaaagattgttaccatatagctattggattggccatccggtgactaacagagcaattatttatttgtttgttgggtttgtaccattgaactacaaggtccttaatactctaaactacattataagtcttaatacagtgca

SEQ ID NO: 224 - DNA, 744 bp, Enterovirus B93
  source 1..744: isolate = 38-03; mol_type = genomic DNA
tttaaaacagcctgtgggttgttcccrctcacagggcccactgggcgctagcacwctggtatyacggtaccyttgtgcgcctgttttaccacccctttccccaaagcaatttagaagaaagactcaaccggtcaatagacagcctagtacaccaactaggccctgaccaagtacttctgtttccccggactgagtatcaataggctgcttacgcggccgaaggagaaaacgttcgttacccggccaattacttcgagaaacccagtaccaccatgaaagttgcgcagtgtttcgctccgcacaaccccagtgtagatcaggtcgatgagtcaccgcatcccccacaggtgactgtggcggtggctgcgttggcggcctgcccatggggcaacccatgggacgcttcaataccgacatggtgcgaagagtctattgagctaattggtagtcctccggcccctgaatgcggctaatcctaactgtggagcagatacccacacaccagtgggcagtctgtcgtaatgggcaactccgcagcggaaccgactactttgggtgtccgtgtttccttttattctcatattggctgcttatggtgacaattgaaaggttgttgccatatagctattggattggccacccagtgactaacagagctattgtttatttgtttgttggatttgtaccattgaattacaaggtccttaatactcttaactacatcataaacctcaatacgacgcg

SEQ ID NO: 225 - DNA, 742 bp, Human enterovirus B97
  source 1..742: mol_type = genomic DNA; strain = 99188/SD/CHN/1999/EV97
ttaaaacagcctgtgggttgttcccacccacagggcccactgggcgctagcacactggtatcacggtacctttgtgcgcctgttttatccacccttccccaagtgacttagaagcataccacacacggtcaacaggcggctcaatgcaccaattgagtcatgaccaagtacttctgttaccccggacttagtatcaataagctgctcacgcggctgaaggagaaaacgttcgttacccggccaattacttcgagaaacctagtagcaccatggaggttgcgcggcgtttcgctccacacaaccccagtgtagatcaggctgatgagtcaccacaatcctcacgggcgaccgtggtggtggctgcgctggcggcctgcccatggggtaacccatgggacgctacaatactgacatggtgtgaagagtctattgagctaattggtagtcctccggcccctgaatgcggctaatcctaactgcggagcagatacccacacaccagtgggcagtctgtcgtaacgggcaactctgcagcggaaccgactactttgggtgtccgtgtttccttttttctcttatactggctgcttatggtgacaattgaaagattgttaccatatagctattggattggccatccagtgacaaacagagcgattgtttacctgttcattggtttcgtaccgctgaattacacagttttaaacacccttaatcttattttggcacttaatacatcaaa

SEQ ID NO: 226 - DNA, 742 bp, Human enterovirus B97
  source 1..742: mol_type = genomic DNA; strain = DT94-0227
ttaaaacagcctgtgggttgttcccatccacagggcccactgggcgctagcacactggtatcacggtacctttgtgcgcctgttttatttcccccctcccgaagtaacctagaagcaggtaatatacggtcaataggtgacacagtataccaactgggtcttgaccaagcacttctgttaccccgggctgagtatcaataagctacttacgtggctgaaggagaaaacgctcgttacccggccaattacttcgagaaacctagtaacaccatgaaggttgcgcagtgtttcgctccgcacaaccccagtgtagaccaggtcgatgagtcaccgcattccccacgggcgaccgtggcggtggctgcgttggcggcctgcccatggggcaacccatgggacgcttcaaaactgacatggtgcgaagagtctattgagctaattggtagtcctccggcccctgaatgcggctaatcccaactgcggagcaaatacccacatgccagtgggcagtctgtcgtaatgggtaactctgcagcggaaccgactactttgggtgtccgtgtttctttttattcttatactggctgcttatggtgacaattgaggaattgttgccatatagctattggattggccatccggtgacaaacagagcaattatttacttgtttgttggattcgtaccgctaaaccacagagtactaagcacccttaattttattatattacttaactcgacaaa

SEQ ID NO: 227 - DNA, 742 bp, Human enterovirus B97
  source 1..742: mol_type = genomic DNA; strain = BAN99-10355
ttaaaacagcctgtgggttgttcccacccacagggcccactgggcgccagcacactggtatcacggtacctttgtgcgcctgttttatccacccttccccaatgtaacttagaagtaaaactagaaagatcaatagcaagcacagtatgccaactgtgttatgatcaagcacttctgttaccccggactgagtatcaataagctgctaaagcggctgaaggagaaaacgttcgttacccggccaactacttcgagaaacccagtaccaccatgaaggttgcgcagtgtttcgctccacacaatcccagtgtagatcaggtcgatgagtcaccgcgttccccacgggcgaccgtggcggtggctgcgttggcggcctgcccatgggatgacccatgggacgcttcaatactgacatggtgcgaagagtctattgagctagttggtagtcctccggcccctgaatgcggctaatcctaactgcggagcagatacccacacaccagtgggcagtctgtcgtaacgggtaactctgcagcggaaccgactactttgggtgtccgtgtttctttttatcctcaaattggctgcttatggtgacaattgataagttgttaccatatagctattggattggccatccggtgtctaacagagctattgtttatttatttgttggtttcgtgccactaaattacaaagtttttgaaactctcaacttcattttgacactcaataaagcaaa

SEQ ID NO: 228 - DNA, 742 bp, Human enterovirus B98
  source 1..742: mol_type = genomic DNA; strain = T92-1499
ttaaaacagcctgtgggttgttcccacccacagggcccaatgggcgccagcactctggtattacggtacctttgtgcgcctgttttatatcccctcccccaattgtaacttagaagcaacacgcaccgaccaacagtgggcgtggcacaccagccacgtcttggtcaagcacatctgtttccccggactgagtatcaatagactgctcacgcggtcgaaggagaaaacgttcgttatccggccaactacttcgagaagcccagtaacaccatgaatattgcgaagtgtttcgctcagcacactcccagtgtagatcaggtcgatgagtcaccgcattccccacgggcgaccgtggcggtggctgcgttggcggcctgcctatggggcaacccgtaggacgcttcaatatggacatggtgtgaagagtctattgagctagttggtagtcctccggcccctgaatgcggctaatcctaaccgcggagcaggcacccacaaaccagtgggcagcttgtcgtaacgggtaactctgcggcggaaccgactactttgggtgtccgtgtttccttttattcttatactggctgcttatggtgacaattgagagattgttgccatatagctattggattggccatccggtgacaaacagagcaattgtttatctatttgttggttttataccgttaagttttaaagtcctaaaaacccttaacttggtcatactactcaactcagcaaa

SEQ ID NO: 229 - DNA, 744 bp, Human enterovirus B100
  source 1..744: isolate = BAN2000-10500; mol_type = genomic DNA
ttaaaacagtctgtgggttgttcccacccacagggcccacgtggcgccagcacactggtatctcggtacctttgtgcgcctgttttatccaccctaaaccccgttgtaacttagaagatgagcaacactgatcaatagtgggtgcaacatgccagttgcatcacgatcaagcacttctgtatccccggactgagtatcaataggctgctcacgcggctgaaggagaaaacgttcgttatccggccagttacttcgagaaacctagtaacatcatggaggttgcgcagtgtttcgctccgcacacccccagtgtagatcaggtcgatgagtcaccgcgttccccacgggcgaccgtggcggtggctgcgttggcggcctgcccatgggataacccatgggacgcttcaatactgacatggtgtgaagagtctattgagctaactggtagtcctccggcccctgaatgcggctaatcctaactgtggagcagacacccacatgccagtgggcagtctgtcgtaacgggcaactccgcagcggaaccgactactttgggtgtccgtgtttccttttattcctatattggctgcttatggtgacaattgaaagattgttaccatatagctattggattggccatccggtgtcaaacagagcaatcatttatttgtttgttggttttatacctctgaactttaaagtgctaaagactctcaattttatattatatctcaacaaatcagg

SEQ ID NO: 230 - DNA, 742 bp, Human enterovirus B101
  source 1..742: mol_type = genomic DNA; strain = CIV03-10361
ttaaaacagcctgtgggttgttcccacccacagggcccactgggcgccagcactctggtattacggtacctttgtgcgcctgttttatatccccctccccacttgaaacttagaagtgaaacacactgatcaatagttgacatggcaagccagccatgtcttgatcaagcacctctgtttccccggacctagtatcaatagactgctcgcgcggttgaaagagaaagcgttcgttacccggctaactacttcgagaaacttagtaacaccatggaagttgcggagtgtttcgctcagcacatccccagtgtagatcaggccgatgagtcaccgcattccccacgggcgaccgtggcggtggctgcgttggcggcctgcctgtggggcaacccacaggacgctctaatacaaacatggtgcgaagagtctattgagctagttagtagtcctccggcccctgaatgcggctaatcctaactgcggagcacgtgcttccaatccaggaggtggcgtgtcgtaacgggtaactctgcagcggaaccgactactttgggtgtccgtgtttccttttattcttgcattggctgcttatggtgacaattgagagattgttaccatatagctattggattggccatccggtgacaaacagagcaattatatatctctttgttggatacattccattgaactacaaggagttaaaaaccctcaattatattctgttcttgaattccgcaag

SEQ ID NO: 231 - DNA, 742 bp, Enterovirus B106
  source 1..742: isolate = AKS-AWT-AFP2F/XJ/CHN/2011; mol_type = genomic DNA
ttaaaacagcctgtgggttgctcccacccacagggcccaatgggcgccagcacactagtattacggtacttttgtgcgcctgttttatccaccctccccccacgtaacatagaagcaaaacctacacggtcaataggtggctcagtaagccaactgagcggtgaccaagcacctctgttaccccggaccgagtatcaataggctgctcacgcggctgaaggagaaaacgttcgttacccggccaattacttcgagaaacccagtatcaccatgaagattgcgaagtgtttcgctccgcacaaccccagtgtagatcgggctgatgagtcaccgcattcctcacgggcgaccgtggcggtggctgcgctggcggcccgcctatggggcaacccatgggacgcttcaatattgacatggtgtgaagagtctattgagctaattggtagtcctccggcccctgaatgcggctaatcctaactgtggagcagatacccacgcaccagtgggcagtctgtcgtaacgggcaactctgcagcggaaccgactactttgggtgtccgtgtttccttttattcttatactggctgcttatggtgacaattgagagattgttaccatatagctattggattggccatccggtgacaaacagagcaattgtctacttattcattggtttcgtaccactaaattacacagcattaaacactctcaattttattttaacacttaatacattaaa

SEQ ID NO: 232 - DNA, 742 bp, Human enterovirus 106
  source 1..742: isolate = 148/YN/CHN/12; mol_type = genomic DNA
ttaaaacagcctgtgggttgttcccacccacagggcccatggggcgccagcacactggtattgcggtacctttgtgcgcctgttttattcaccctttcccaatgaaacttagaagcttaactcaaccggtcgatagacagcccagtacaccaactgggttttgaccaagtactcctgtttccccggactgagtatcaataagctgctcgcgcggctgaaggagaaaacgttcgttacccggccaattacttcgagaaacctagtaccaccatgaacgttgcgcagtgtttcgctccgcacaaccccagtgtagatcaggtcgatgagtcaccgcaatccccacgggcgaccgtggcggtggctgcgctggcggcctgcccatggggcatcccatgggacgcttcaatactgacatggtgcgaagagtctattgagctaattggtaatcctccggcccctgaatgcggctaatcctaactgcggggcagacacccacacgccagtgggcagtctgtcgtaacgggtaactccgcagcggaaccgactactttgggtgtccgtgtttccttttatctttatattggctgcttatggtgacaattgaaagattgttgccatatagctattggattggccatccggtgtctaatagagcaattatatatctctttgttggcttcatcccgttaaataaagtgagctaccagaccctgtgctatattatcaaattgaacacaataaa

SEQ ID NO: 233 - DNA, 707 bp, Enterovirus C96
  source 1..707: mol_type = genomic DNA; strain = VEN/2018-23123A
gcggccagtactccggtattacggtacccttgtacgcctgttttatactcccttccccgtaacttagaagacttcaaagaaatccaagttcaataggagggggtacaaaccagtaccaccacgaacaagcacttctgttcccccggtgaagttgtatagactgtacccacggttgaaaacgactgatccgttatccgctctaatacttcgagaagcttagtatcatcttggaatcttcgatgcgttgcgctcagcactcaaccctggagtgtagcttaggtcgatgagtctggacgttcctcaccggtgacggtggtccaggctgcgttggcggcctacctgtggcccaaagccacaggacgctagttgtgaacaaggtgtgaagagcctattgagctattagagattcctccggcccctgaatgcggctaatcccaaccacggagcaggcgcttacaaaccagtaagtagcttgtcgtaacgcgaaagtctgtggcggaaccgactactttgggtgtccgtgtttccttttatttttaaatggctgcttatggtgacaatcattgattgttatcataaagcgagttggattggccatccggtgaaagtgagactcatcatatatctatttgttggatttactcctttgactaagtatactctcaacattatattcattgtaatattaattagaagatactatcata

SEQ ID NO: 234 - DNA, 747 bp, Enterovirus C96
  source 1..747: isolate = 127/SD/CHN/1991; mol_type = genomic DNA
ttaaaacagctctggggttgttcccaccccagaggcccacgtggcggccagtacaccggtattacggtacccttgtacgcctgttttatactccctacccctgcaacttagaagcaaataatccaagttcaatagtagggggtacaaaccagtaccaccacgaacaagcacttctgtttccccggtgatgttgtatagactgtacccacggttgaaaacaattgatccgttacccgctcttgtacttcgagaagcctagtatcatcttggaaccttcgatgcgttgcgctcagcactcaaccccagagtgtagcttgggtcgatgagtctggacaatccacaccggcgacggtggtccaggctgcgttggcggcctacctgtggcccaaagccacaggacgctagttgtgaacaaggtgtgaagagcctattgagctacaagagagtcctccggcccctgaatgcggctaatcccaaccacggagcaggtgatcacaacccagtgattagcctgtcgtaatgcgtaagtctgtggcggaaccgactactttgggtgaccgtgtttccttttatttttattgtggctgcttatggtgacaatcttagattgttatcataaagcgatttggattggccatccggtgaaagttaaacacattatttacttgtttgttggattcactccgttgtcctctcgcactacgtatattattaacgctgtgctattaattaggtcaatacatcaca

SEQ ID NO: 235 - DNA, 744 bp, Enterovirus C96
  source 1..744: clone = V13C; mol_type = genomic DNA
ttaaaacagctctggggttgttcccaccccagaggcccacgtggcggccagtacaccggtattacggtacccttgtacgcctgttttatactcccttccccgcaacttagaagttaaacaaaccaagttcaatagaagggggtgcaaaccagtaccaccacgaacaagcacttctgtttccccggtgacgtcatataggttgtaaccacggccaaaagtgactgatccgttatccgctcttgtacttcgagaagcccagtaccatcttgggatcttcgatgcgttgcgctcagcactcgaacccggagtgtagcttaggccgatgagtctggacattccccaccggtgacggtggtccaggctgcgttggcggcctacctgtggtccaagccacaggacgctagatgtgaacaaggtgtgaagagcctattgagctacaagggaatcctccggcccctgaatgcggctaatcctaactacggagcagacggtcacaaaccagtgaatggtctgtcgtaatgcgcaagtctgtagcggaaccgactactttgggtgtccgtgtttccttttatctttttaatggctgcttatggtgacaatcctagattgttatcataaagcgatttggattggccatccagtgatatttgaaaccattactgtattgcctgctaaggctattttaaagacttaataaacacaacttcattcaactcaattacaccaactaacaactgtctcata

SEQ ID NO: 236 - DNA, 724 bp, Enterovirus C99
  source 1..724: mol_type = genomic DNA; strain = 10L1
caccccagaggcccacgtggcggctagtactccggtatcacggtacccttgtacgcctgttttatgctcccttccccttgtaacttagaagcaaacaacactagttcaataggagggggtacaaaccagtaccaccacgaacacgcacttctgtttccccggtgaagctgcataagctgttcccacggctgaaagcgactgatccgtcatccgctcaggtacttcgggaagcctagtaccatcttggaatcttcgatgcgttgcgctcagcactcaaccccagagtgtagcttaggctgatgagtctggatgtgcctcactggtgacagtggtccaggctgcgttggcggcctacccatggcccaaagccatgggacgctagttgtgaacaaggtgtgaagagcctactgagctacctgagagtcctccggcccctgaatgcggctaatcccaaccacggagcgagtgcccacaatccagtgagtggctcgtcgtaatgcgcaagtctgtggcggaaccgactactttgggtgtccgtgtttccttttaaccttattatggctgcttatggtgacaatcatagattgttatcataaagcgaattggattggccatccggtgaaagtcagaacgctaatttatctgtttgttggatacaccaaagttaactgcaatacactaaccttgattcgcatagtgttgttaattagatatcattaccaca

SEQ ID NO: 237 - DNA, 717 bp, Human enterovirus C104
  source 1..717: isolate = kvv585-16-TS; mol_type = genomic DNA
ttaaaacagcctgggggttgttcccacccccagggtccaatggacgctagtacaccggtatcacggtacccttgtacgyctgttttataatccccttcccccgtaacgttagaagcacaaaagcaaccgctcaatagacaccatacatccagtgtggttacgagcaagcacttctgtctccccggttgcgccctatatgctgtgtgaacggcaaaaaggggcaatatcgttacccgcttgactactacgggaaacccagtatcatcttcgattgatttgagagttgcgttcagcgcctgacccccggcgtagctcaggctgatgaggctccgaacaccccacaggtgactgtgtcggagcctgcgttggcggcctgcccataccctgcggtatgggacgctcacttcatgacatggtgcgaagagtctactgtgctagtcaagattcctccggcccctgaatgtggataatcctaaccactgatcctatgttcgcaatccagcgttcagtaggtcgtaacgcgcaagtcggtggcggaaccaactactttgggtgtccgtgtttcctttatttcctactgaatgcttatggtgacaattgttttgatcagttgttgccattgctcgcattcagtgtgcaattacaaaaacaaaactatcagttgttaccatccctcacgttcagtgtataatcacaaaaacgagtttttctgttata

SEQ ID NO: 238 - DNA, 635 bp, Human enterovirus C105
  source 1..635: mol_type = genomic DNA; strain = USA/OK/2014-19362
cccctaggatccactggatgttagtacactggtatcgcggtacctttgtacgcctgttttatatccccttccccgcaactttagaagtatcaaaagtaccgctcaatagccgccacgctcccagtgtggtttcgagcaagcacttctgttttcccggttgcgtcccatatgctgtgcaaacggcaaaaagggacaatatcgttacccgcttgtatactacgggaaacctagtaccgccattgattgtattgagggttgcgctcatcacctttcccggtgtagctcaggctgatgaggctcagaatcccccacaggtaactgtgtctgagcctgcgttggcggcctgccctcgccttatggcgtgggacgctcactacatgacatggtgcgaagagtctactgtgctatacaagagtcctccggcccctgaatgtggataatcctaaccactgatcccacgtacgcaaaccagcgtgtagtgggtcgtaacgcgcaagtcggtggcggaaccgactactttgggtgaccgtgtttcctttattacctattgaatgtttatggtgacaattgtttgattcagttgttaccatttgctacattcaataacctagtgtcaaaccgattgaattgctaca

SEQ ID NO: 239 - DNA, 689 bp, Human enterovirus C116
  source 1..689: mol_type = genomic DNA; strain = 126
ttcccactccagaggcccacgtggcggctagtactctggtattgcggtacctttgtacgcctgttttataccccctccccaagtaactttagaagcaattcacaaagttcaatagagggggtacaaaccagtaccaccacgaacaagcacttctgtttccccggtgaagctacatagactgtccccacggtcgaaggtggcagatccgttatccgctcaagtacttcgagaagcctagtaccaccttggaatcttcgatgcgttgcgctcagcactctaccccgagtgtagcttaggtcgatgagtctgggcatgccccaccggtgacggtggcccaggctgcgttggcggcctacccgtggctaacgccatgggacgctagttgtgaacaaggtgtgaagagcctattgagctacttgagagtcctccggcccctgaatgcggctaatcctaaccacggagcaagtgctcacaaaccagtgagtggcttgtcgtaacgcgtaagtctgtggcggaaccgactactttgggtgtccgtgtttccttttattttcattatggctgcttatggtgacaatctaagattgttatcatatagcttttggattggccatccggtgatttgaaagagatatatttaccttattgttctaccatatctaattactcatcacagccacataatcaca

SEQ ID NO: 240 - DNA, 672 bp, Enterovirus C117
  source 1..672: mol_type = genomic DNA; strain = JX-C117-40-2017
tttaaaacagcttgagggttgttcccaccctcagggcctactgggcgctagtacaccggtatctcggtacccttgtacgcctgttttatcttccctccccaaaagtaactttagaagcaagtaaactcacagctcaacagccatcgcaccgccagtgcgattttgagcaagcactcctgtttccccggttgcgtcccatatgctgtgaaaacggcagaaggggacaatatcgttacccgcttatctactacgggaagcctagtaacaccattgagcactttgagggttgcgttcagcgctaaacccagcgtagctcaggctgatggggcttcggaatccccacgggtgaccgtgtcgaagcccgcgttggcggcctgcccacaccaatgggtgtgggacgctcaatttgtgacatggtgcgaagagcctactgtgctaggtgagagtcctccggcccctgaatgtggctaatcctaaccaccgaacccgtggttgcaatccagcaactagcgggccgtaatgcgcaagtcggtgatggaaccaactactttgggtgaccgtgtttcctttatctcttatattgcaattttatggtgacatttatagtatttaagtgttaccatatattgcgcaaatacattgtaataatacagagttattactacggaaatc

SEQ ID NO: 241 - DNA, 669 bp, Human enterovirus C118
  source 1..669: isolate = CQ5185; mol_type = genomic DNA
tttttaaaacagcctgggggttgtttccccctccgaggtcccctggacgcccgtaccccggcatcacggtgcccttgtatgcctgttttataatcccccccccccgcaactttagaagaaaacgaactccgagctcagtaggcgtcacgtttccagcgtgactacgagcaagcacttctgtttccccggttgcgccctatatgctgtgtgaacggcagaaaggggcaaaatcgttatccgcttgattactgcgggacgcctagtatcactatggattgacttgagggttgcgctcagcacatccccagtgtagcttgggccgatgaggctccgaattccccacgggcgaccgtgtcggagcctgcgttggcggcctacccgcgcctcacggcgtgggacgctcatttcatgacatggtgcgaagagtctactgcgctaatcaaggctcctccggcccctgaatgtggctaatcctaaccactgatcctgtgagcacacgccagtgcccagcaggtcgtaatgcgcaagtcggtggcggaaccaactactttgggtgtccgtgtttcctttatttcctcattgaatgcttatggtgacaattgttgagtacagttgttaccattactgcactctgcaaatagtgaataaaccacgcaacaatataacaca

SEQ ID NO: 242 - DNA, 732 bp, Human enterovirus D68
  source 1..732: mol_type = genomic DNA; strain = Fermon
ttaaaacagctctggggttgttcccactcaagggcccacgtggcggctagtactctggtatctcggtacctttgtacgcctgttttaattccctccccaacgtaacttagaagcttttaaaccaaagctcaataggtggagcgcaaaccagcgctcttatgagcaagcacttctgtctccccggtgtggttgtatagactgtccccacggttgaaaacaacttatccgttaaccgctatagtacttcgagaaacctagtattgccttcggagtgttgatgcgttgcgctcagcacactaacccgtgtgtagcttgggtcgatgagtctggacgtaccccactggcgacagtggtccaggctgcgttggcggcctactcatggtgaaaaccatgagacgctagacatgaacaaggtgtgaagagtctattgagctgctatagagtcctccggcccctgaatgcggctaatcctaaccatggagcaagtgctcacaaaccagtgagttacttgtcgtaacgcgcaagtccgtggcggaaccgactactttgggtgtccgtgtttcactttttacttttatgactgctaatggtgacaatttaatattgttaccatttggcttgtcgaattgatcacataagatctatagttttgttcactgatttgctttgaaataatctcacctcaaaacctccagtacataacatttaaagagtttaaacttatttataaca

SEQ ID NO: 243 - DNA, 710 bp, Enterovirus D68
  source 1..710: isolate = TBp-13-Ph209; mol_type = genomic DNA
ttaaaacagccttggggttgttcccaccccaagggcccacgtggcggctagtactctggtatttcggtacctttgtacgcctgttttatctccctccctaatgtaacttagaagctttcaaatcaaagctcaataggtggagcgcaagccagcgcttccgtgagcaagcactcctgtttccccggtgcggttgtatagactgttcccacggttgaaaacaacctatccgttatccgctatagtacttcgagaaacctagtatcacctttggattgttgatgcgttgcgctcagcacactaacccgtgtgtagcttgggtcgatgagtctggacataccccactggtgacagtggtccaggctgcgttggcggcctactcatggtgaaaaccatgagacgctaaacatgaacaaggtgtgaagagtctattgagctactatagagtcctccggcccctgaatgcggctaatcttaaccatggagcaagtgcttacaaaccagtgagttgcttgtcgtaatgcgcaagtccgtggcggaaccgactactttgggtgtccgtgtttcactttttacttttatgactgcttatggtgacaatttaatattgttaccatttagctagtcaaattaatcatataaaactctaaatcccatctaacaattcacatttggatagcttcattttgaggattttaaacctatttacaaag

SEQ ID NO: 244 - DNA, 726 bp, Enterovirus D70
  source 1..726: mol_type = genomic DNA; strain = JPN/1989-23292
ttaaaacagctctggggttgttcccaccccagaggcccacgtggcggctagtactccggtactccggtacccttgtacgcctgttttatactcccctccccaagcaactttagaagatataaactaatgttcaacaggagggggtacaaaccagtaccaccacgaacagacacttctgtttccccggtgaagttgcatagactgtacccacggttgaaagcgatgaatccgttatccgcttaggtacttcgagaagcctagtatcgtcttggaatcttcgatgcgttgcgctcagcactctaccccgagtgtagcttaggtcgatgagcctggacaccccacaccggcgacggtggtccaggctgcgttggcggcctacccatggctaacaccatgggacgctagttgtgaacaaggtgtgaagagcctattgagctacctaagagtcctccggcccctgaatgcggctaatcccaaccacggagcaaatgctcacaatccagtgagtggtttgtcgtaacgcgcaagtctgtggcggaaccgactactttgggtgtccgtgtttccttttatttttattatggctgcttatggtgacaatctgagattgttattatatagctattggattggccatccggtgatatcttgaaattttgctataattttccacaaattttacaacatcacactacaccttcttttaaacaattgagacaactcata

SEQ ID NO: 245 - DNA, 753 bp, Enterovirus D94
  source 1..753: mol_type = genomic DNA; strain = ANG/2010-23293
ttaaaacagctctggggttgttcccaccccagaggcccacgtggcggctagtactccggtattacggtacccttgtacgcctgttttatactcccttcccccgtaacttagaagtaacacaaatccaagttcaatagaagggggtacaaaccagtaccaccatgaacaagcacttctgtttccccggtgaaatcatagactgtacccacggttgaaagtgatcgatccgtcatccgctcttgtacttcgagaagcctagtatcaccttggaatcttcgatgcgttgcgctcaacactcaaccccagagtgtagcttaggctgatgagtctggacactccccaccggcgacggtggtccaggctgcgttggcggcctacctgtggtccaaagccacaggacgctagttgtgaacaaggtgtgaagagcctattgagctacaggagagtcctccggcccctgaatgcggctaatcccaaccacggagcaggtggtcataatccaatgattggcctgtcgtaacgcgcaagtctgtggcggaaccgactactttgggtgtccgtgtttccttttattttatcattggctgcttatggtgacaatctaagattgccatcatatagcttttggattggccatccggtgatacttcgagttatttagcttgctgcttacatttattttaaacaacatccagttaccagcattcctattttgtttttctttcattctgagttatctaataagtagttaga

SEQ ID NO: 246 - DNA, 681 bp, Human enterovirus D94
  source 1..681: isolate = isolate 19/04; mol_type = genomic DNA
ttggtacctttgggggcctgttttatatcccttccctcattgtaacttagaagtttcaaaatacagctcaatagacagtagtgcaaaccagtactgctacgagcaagtacttctgttaccccggtgaagttgcatagactgtacccacggttgaaagtgactgatccgttatccgctttagtacttcgagaagcctagtaacatcttggaatcttcgatgcgttgcgctcagcactcaaccccagagtgtagcttaggtcgatgagtctggacattcctcaccggcgacggtggtccaggctgcgttggcggcctacctgtggcccaaagccacaggacgctagttgtgaacaaggtgtgaagagcctattgagctactaaagagtcctccggcccctgaatgcggctaatcccaaccacggagcaagtgctcacaatccagtgagtggcttgtcgtaacgagcaattctgtggcggaaccgactactttgggtgtccgtgtttccttttatttttatcattggctgcttatggtgacaatctaagattgccatcatatagcttttggattggccatccggtgatatttcgagctatacaacttactgtttacagctcttttaaatagcattcaattaccagcactcatactttgttttgaattactaccaaatagtcaga

SEQ ID NO: 247 - DNA, 742 bp, Enterovirus D111
  source 1..742: mol_type = genomic DNA; strain = ANG/2010-23294
ttaaaacagctctggggttgttcccaccccagaggcccacgtggcggccagtactccggtattgcggtacccttgtacgcctgttttatactcccttcccccgtaacttagaagaaataaaccaagttcactaggagggggtacaaaccagtaccaccacgaacaagcacttctgtttccccggtgacattgcatagactgtacccacggttgaaagcgactgatccgttacccgctactgtacttcgagaagcctagtaccatcttggaatcttcgacgcgttgcgctcagcactcaaccccagagtgtagcttaggtcgatgagtctggacaatccccaccggtgacggtggtccaggctgcgttggcggcctacctgtggcccaaagccacaggacgctagttgtgaacaaggtgtgaagagcctattgagcttcagtagagtcctccggcccctgaatgcggctaatcccaaccacggagcaggtggtcataatccaatgactggcctgtcgtaacgcgcaagtctgtggcggaaccgactactttgggtgtccgtgtttccttttattttgtcaatggctgcttatggtgacaatctaagattgccatcatatagcttttggattggccatccggtattattttgagttatttgatttgttgtccacagctctttacagtatcacttaactattattgtttgtattttgctccttggatcacaaccaggtaatcaga

SEQ ID NO: 248 - DNA, 709 bp, Enterovirus D111
  source 1..709: isolate = D111-NGR-KAT-1263; mol_type = genomic DNA
aggcccacgtggcggccagtactctggtattacggtacctttgtacgcctgttttatatcccttcccccaatgtaacttagaagttcttaaacatagctcaatagacagtagtacacaccagtactgctacgagcaagcacttctgttaccccggtgaagttacatagactgtacccacggttgaaagcgactgatccgttatccgctttagtacttcgagaagcctagtaatatcttggaatcttcgatgcgttgcgctcaacactcaaccccagagtgtagcttaggtcgatgagtctggacattccccaccggcgacggtggtccaggctgcgttggcggcctacctgtgacccaaagtcacaggacgctagttgtgaacaaggtgtgaagagcctattgagctactaaagagtcctccggcccctgaatgcggctaatcccaaccacggagcaagtgctcacaacccagtgagtggcttgtcgtaacgagtaattctgtggcggaaccgactactttgggtgtccgtgtttcctttatttttatcattggctgcttatggtgacaatctaagattgccatcatatagcttttggattggccatccggtgatattttgagttattcaaattgctatttacagcattctttgtacactgttcattcatcactatttgcattttgttcttgaattttaaacagtcaaa

SEQ ID NO: 249 - DNA, 654 bp, Simian enterovirus J103
  source 1..654: isolate = isolate cg8227; mol_type = genomic DNA
tttgtacgcctattttaaaacccctacccccgtaacttagaagcatttgacacaagttcaatagtaggaccatcatccaggtggttcatcgaacaagcacttctgttaccccggtcctagtacctgtgaagctgtacccacggcggaaggggaaaacgatcgttacccggctatctacttcgagaagcctagtaacagcattgaaactcttgagcgttgcgttcagcacagtaacccctgtgtagctttggctgatgagtctgggcattccccactggcgacagtggcccaggctgcgttggcggccaaccgatccgggcaaccgggtcggacgcttatttgtggacatggtgtgaagagcctattgagctagatagtagtcctccggcccctgaatgcggctaatcctaactccggagcaaatgcacgcaacccagcgtgtagtttgtcgtaacgcgtaagtctggagcggaaccgactactttgggtgtccgtgtttcctgttttaccttatttggctgcttatggtgacaatatagtattgttaccatatagctattggattggccatccggtgaacagatttcgacaaactctattttactgttgttcacagcctaaagttacaaatcttactctgactcagtagtaatc

SEQ ID NO: 250 - DNA, 680 bp, Coxsackievirus A2
  source 1..680: isolate = HN202009; mol_type = genomic DNA
cgcgtcttgtgcgctgttttataggcctcctccttaataggttacttagaagctgacatttacacgaccaatagtgggcgtggcgcaccagccacgtcttggtcaagcactcctgtttccccggaccgagtatcaataggctgctcacgtggctgaaagagaaagtgttcgttatccggctaactacttcgggaaacccagtaacaccatgaaagttgcagagtgtttcgctcagcacttcccccgtgtagatcaggctgatgagtcactgcgaaccccacgggcgaccgtggcagtggctgcgttggcggcctgcctatggggtaacccataggacgctctaatacagacatggtgcgaagagtctactgagctagttagtattcctccggcccctgaatgcggctaatcctaactgcggagcacataccctcaatccagagggcggtgtgtcgtaacgggcaactctgcagcggaaccgactactttgggtgtccgtgtttccttttatccttatgctggctgcttatggtgacaattgaaaggttgttaccatatagctattggattggccatccggtgactaacagagctttggtttatcaattcattgggttcgtgcccttatcatctacagtttatacaactttggtatacttgttatatcttaatagtaagaa

SEQ ID NO: 251 - DNA, 746 bp, Coxsackievirus A2
  source 1..746: isolate = 16027; mol_type = genomic DNA
ttaaaacagcctgtgggttgtacccacccacagggcccactgggcgttagcacactgattctacggaacctttgtgcgcctgttttatatccctcccctaaaatagtaacttagaagttgaacatttacacgaccaatagtgggcgtggcgcaccagccacgtcttggtcaagcactcctgtttccccggactgagtatcaataggctgctcacgtggctgaaggagaaagtgttcgttatccggctaactacttcgggaaacccagtaacaccatgaaagttgcagagtgtttcgctcagcacttcccccgtgtagatcaggctgatgagtcactgcgaaccccacgggcgatcgtggcagtggctgcgttggcggcctgcctatggggcaacccataggacgctctaatacagacatggtgcgaagagtctactgagctagttggtattcctccggcccctgaatgcggctaatcctaactgcggagcacatgccctcaatccagagggtggtgtgtcgtaacgggcaactctgcagcggaaccgactactttgggtgtccgtgtttccttttactcttatactggctgcttatggtgacaattgaaaggttgttaccatatagctattggattggccatccggtgactaacagagctttgatttatcaattcattgggtttgtgcccttatcatctacagtttactcaaccttggtgtacttgttatatcttaatagtaagaa

SEQ ID NO: 252 - DNA, 746 bp, Coxsackievirus A2
  source 1..746: isolate = CVA2-1388-M14/XY/CHN/2017; mol_type = genomic DNA
ttaaaacagcctgtgggttgtacccacccacagggcccactgggcgttagcacactgattctacggaatctttgtgcgcctgttttatatccctcccctaaaatagtaatttagacgttgaacatttacacgaccaatagtgggcgtggcgcaccagtcacgtcttggtcaagcactcctgttcccccggaccgagtatcaataggctgctcacgtggctgaaggagaaagtgttcgttatccggctaactacttcgggaaacccagtaacaccatgaaagttgcagagtgtttcgttcagcacttcccccgtgtagatcaggctgatgagtcactgcaaaccccacgggcgaccgtggcagtggctgcgttggcggcctgcctatggggtaacccataggacgctctaatacagacatggtgcgaagagtctactgagctagttagtattcctccggcccctgaatgcggctaatcctaactgcggagcacatgccctcaatccagagggtggtgtgtcgtaatgggcaactctgcagcggaaccgactactttgggtgtccgtgtttccttttattcttatactggctgcttatggtgacaattgaaaagttgttaccatatagctattggattggccatccggtgaataacagagctttggtttatcagttcattgggttcgtgcccttatcatctacagcttacacaactttggtgtacttgttatatcttaatagtaagaa

SEQ ID NO: 253 - DNA, 746 bp, Coxsackievirus A2
  source 1..746: isolate = CVA2/Shenzhen50/CHN/2012; mol_type = genomic DNA
ttaaaacagcctgtgggttgtacccacccacagggcccactgggcgttagcacactgattctacggaatctttgtgcgcctgttttatatccctcccctaaaatggtaacttagaagttgaacatttacacgaccaatagtgggcgcggcgcaccagccacgtcttggtcaagcactcctgtttccccggactgagtatcaataggctgctcacgtggctgaaggagaaagtgttcgttatccggctaactacttcgggaaacccagtaacaccatgaaagttgcagagtgtttcgctcagcacttcccccgtgtagatcaggctgatgagtcactgcgaaccccacgggcgaccgtggcagtggctgcgttggcggcctgcctatggggcaacccataggacgctctaatacagacatggtgcgaagagtctactgagctagttagtattcctccggcccctgaatgcggctaatcctaactgcggagcacatgccctcaatccagagggtggtgtgtcgtaacgggcaactctgcagcggaaccgactactttgggtgtccgtgtttccttttattcctgtactggctgcttatggtgacaattgaaaggttgttaccatatagctattggattggccatccggtgactaacagagctttggtttatcaattcattgggttcgtacccttatcatctacagtttattcaactttggtttacttgttatatcttaatagcaagaa

SEQ ID NO: 254 - DNA, 746 bp, Coxsackievirus A2
  source 1..746: mol_type = genomic DNA; strain = 2260165
ttaaaacagcctgtgggttgtacccacccacagggcccactgggcgttagcacactgattctacggaatctttgtgcgcctgttttatatccctcccctaaaatagtaacttagaagttgaacatctacacgaccaatagtgggcgtggcgcaccagccacgtcttggtcaagcactcctgtttccccggactgagtatcaataggctgctcacgtggctgaaggagaaagtgttcgttatccggctaactacttcgggaaacccagtaacaccatgaaagttgcagagtgtttcgctcagcacttcccccgtgtagatcaggctgatgagtcactgcgaaccccacgggcgaccgtggcagtggctgcgttggcggcctgcctatggggcaacccataggacgctctaatacagacatggtgcgaagagtctactgagctagttggtattcctccggcccctgaatgcggctaatcctaactgcggagcacatgccctcaatccagagggtggtgtgtcgtaacgggcaactctgcagcggaaccgactactttgggtgtccgtgtttccttttactcttatactggctgcttatggtgacaattgaaaggttgttaccatatagctattggattggccatccggtgactaacagagctttgatttatcaattcattgggtttgtgcccttatcatctacagtttattcaaccttggtgtacttgttatatcttaatagtaagaa

SEQ ID NO: 255 - DNA, 744 bp, Coxsackievirus A4
  source 1..744: mol_type = genomic DNA; strain = CA4/JX2204/2014
cagtgggccctgtgggttgtacccacccacagggcccactgggcgctagcactctgattccacgggatccttgtgcgcctgttttatatcccctccccaagttgtaacttagaagtattacactacaatgatcagtagcaggcgtggcgcaccagccatgtctcgatcaagcacttctgtttccccggaccgagtatcaatagactgctaacgcggttgaaggagaaaacgttcgttatccggctaactacttcgagaaacctagtagcaccatcgaagctgcggggcgtttcgctcagcacttcccccgtgtagatcaggtcgatgagtcactgcaatcctcacgggcgaccgtggcagtggctgcgttggcggcctgcctatggggcaacccataggacgcttcaaagtggacatggtgtgaagagtctattgagctagttagtagtcctccggcccctgaatgcggctaatcctaactgcggagcacataccttcaatccagaaggtagtgtgtcgtaacgggcaactctgcagcggaaccgactactttgggtgtccgtgtttccttttattctcttattggctgcttatggtgacaattgaagaattgttaccatatagctattggattggccatccagtgtctaacagagcaattgtgtacttgtttgttggttttgttcccttgtcttacacgtctcttagcaccttgtattacattataaaactgaactcggaaag

SEQ ID NO: 256 - DNA, 748 bp, Coxsackievirus A4
  source 1..748: isolate = HK458564/2016; mol_type = genomic DNA
tttaaaaccaagctgtgggttgtacccactcacagggcccactgggcgctagcactctgattccgcggaatctttgtgcgcctgttttataacccctcccccgatttgtaatttagaagtaatgcacaccactgatcaacagcaagcgtggcgcgccagccatgttcagatcaaatacttctgttttcccggactgagtatcaatagactgctcacgcggttgaaggagaaaacgttcgttacccggctaactacttcgagaaacctagtagcaccatcgaaactgcagagtgtttcgctcagcactttccccgtgtagatcaggtcgatgagtcactgcaatccccacgggcgaccgtggcagtggctgcgttggcggcctgcctatgggcttgcccataggacgctctaatgtggacatggtgtgaagagtctattgagctagttggtagtcctccggcccctgaatgcggctaatcctaactgcagagcgcataccctcaatccagggggtggtgcgtcgtaacgggcaactctgcagcggaaccgactactttgggtgtccgtgtttccttttattcttatattggctgcttatggtgacaattgagagattgttgccatatagctattggattggccatccagtgtctaacagagcaattgtatacttgtttgttggattcgttccactgtcatatacatccactaacaccttatactatattacaaaattgaacacaagaaa

SEQ ID NO: 257 - DNA, 745 bp, Coxsackievirus A5
  source 1..745: isolate = CV-A5-3487-M14-XY-CHN-2017; mol_type = genomic DNA
ttaaaacagcctgtgggttgtacccacccgcagggcccactgggcgctagcactctggtaccacggtacctttgtgcgcctgttttatctccccaaaccccgtaacgctacattagaagttaaacaatatgaccgatagtcagtggggcaacccagcctcactttggtcaagcacttctgttctcccgggcttagtaccaataagctgctcgcgcggctgaaggggaacgcgcccgttatccggctaactacttcgagaaacctagtaccaccatggaagttgcagagtgtttcgctcagcactaccccagtgtagatcaggctgatgagtcaccgtgcaccccacgggcgaccgtgacggtgactgcgttggcggcctgcccatggtgtataccatgggacgctctaatacagacatggtgcgaagagtctattgagctagttagtagtcctccggcccctgaatgcggctaatcctaactgcggagcacgcgctctcaacccagagagtagcgtgtcgtaacgggtaactctgcagcggaaccgactactttgggtgtccgtgtttctttttattcttacattggctgcttatggtgacaattgagagattgttaccatatagctattggattggccatccggtgtgtaacagagctatcatatattcttttgttggcttcgtgccactagattatactgcaattgttactttaaggtacatcttacttctgaatacggtaaa

SEQ ID NO: 258 - DNA, 746 bp, Coxsackievirus A5
  source 1..746: mol_type = genomic DNA; strain = CVA5/13164/HUN/2015
tttaaaacagcctgtgggttgtacccacccacagggcccactgggcgctagcactctggtactacggtacccttgtgcgcctgttttatcttcccaaaccccgtaacgctacactagaagttagacactgtgaccaatagtcagtggggcaacccagccccacttcggtcaagtacctctgtttccccgggtctagtaccaataggctgcttacgcggctgaaggggagcgcgcccgttatccggctaactacttcgagaaacctagtaccaccatggaagttgcagagtgtttcgctcagcacaaccccagtgtagatcaggtcgatgagtcaccgtacaccccacgggcgaccgtgacggtggctgcgttggcggcctgcccatggtgcacaccatgggacgctctaatacagacatggtgcgaagagtctattgagctagttagtagtcctccggcccctgaatgcggctaatcctaactgcggagcatgtgctctcaacccagagggtagcatgtcgtaacgggcaactctgcagcggaaccgactactttgggtgtccgtgtttccttttattcttatattggctgcttatggtgacaattgaaagattgttaccatatagctattggattggccatccggtgtgcaatagagctattgtatattcttttgttggctttgtgccattagattatacggcaactggtactttaagatacattcagcttttgaacacagcaaa

SEQ ID NO: 259 - DNA, 741 bp, Coxsackievirus A6
  source 1..741: isolate = DN1501; mol_type = genomic DNA
gacttgtgggttgtacccacccacagggcccactgggcgctagcacactgattctacggaatctttgtgcgcctgttttataaccccttcccccaaaactgtaacttagaagaatattacactattgatcaatagcaggcatggcgcgccagtcatgtctagatcaagcacttctgtctccccggactgagtatcaatagactgctagcgcggttgaaggagaaaacgtccgttacccggctaactacttcgagaaacttagtagcaccattgaagctgcggagtgtttcgttcagcactcccccagtgtagatcaggtcgatgagtcactgcactccccacgggcgaccgtggcagtggctgcgttggcggcctgcctatggggcaacccataggacgctctaaagtggacatggtgtgaagagtctattgagctagttagtagtcctccggcccctgaatgcggctaatcccaactgcggagcacatgctctcaatccagagggtggtgtgtcgtaacgggcaactctgcagcggaaccgactactttgggtgtccgtgtttccttttattcttatattggctgcttatggtgacaattgagagattgttaccatacagctattggattggccatccagtgacaagcagagccttgatatacttgttcgtgggttttgttccactcaccagtcgtacagttcatactctaaagtacattctgattctgaacaatagaaa

SEQ ID NO: 260 - DNA, 748 bp, Coxsackievirus A6
  source 1..748: mol_type = genomic DNA; strain = RYN-A1205
ttaaaacagccctgtgggttgtacccacccacagggcccactgggcgctagcacactgattctatggaatctttgtgcgcctgttttataaccccttccccaaaactgtaacttagaagaatatcacactaccgatcaatagcaggcatggcgcgccagtcatgtctagatcaagcacttctgtctccccggattgagtatcaatagactgctagcgcggttgaaggagaaaacgtccgttacccggctaactacttcgagaaacttagtagcaccattgaagctgcggagtgtttcgctcagcactctcccagtgtagatcaggtcgatgagtcactgcactccccacgggcgaccgtggcagtggctgcgttggcggcctgcctatggggcaacccataggacgctctaaagtggacatggtgcgaagagtctattgagctagttagtagtcctccggcccctgaatgcggctaatcctaactgcggagcacatgccctcaatccagggggtggtgtgtcgtaacgggcaactctgcagcggaaccgactactttgggtgtccgtgtttcctttttttcttatattggctgcttatggtgacaattgagagattgttaccatatagctattggattggccatccagtgacaaacagagctttgatatacttgttcgtgggtttcgttccactcatcagtcgtacagttcatactttaaagtacattctgattctgaacaatagaaa

SEQ ID NO: 261 - DNA, 746 bp, Coxsackievirus A7
  source 1..746: mol_type = genomic DNA; strain = MAD-3101-11
tttaaaacagcctgtgggttgcacccacccacagggcccactgggcgccagcactctgattccgcggaatctttgtgtgcctgttttatcacccttcccccaaacttgcaacttagaagcagcacttcactgaccaatagcaggcgtggcgcaccagccatgtctaggtcaagcacttctgtttccccggactgagtatcaataggctgctcacgcggctgaaggagaaaacgttcgtcatccggctaactacttcgagaaacctagtagcaccggtgaagctgcagagtgtttcgctcagcacttcccccgtgtagatcaggtcgatgagtcactgcactccccacgggcgaccgtggcagtggctgcgctggcggcctgcctatgggtcaacccataggacgctctaatgtggacacggtgcgaagagtctattgagctagttagtagtcctccggcccctgaatgcggctaatcctaactgcggagcacatgcccccgaaccagggggtggtgtgtcgtaacgggcaactctgcagcggaaccgactactttgggtgaccgtgtttccttttgttcttattatggctgcttatggtgacaattgaagaattgttaccatatagctattggattggccatccagtgtctaacagagctatcatatacctatttgttggattcgttctattgtcatacacatcactcaatacattacattttattgtgagattaaatacaagaaa

SEQ ID NO: 262 - DNA, 748 bp, Coxsackievirus A8
  source 1..748: isolate = 13-467/GS/CHN/2013; mol_type = genomic DNA
ttaaaacagcctgtgggttgcacccacccacagggcccactgggcgctagcactctgattctatggaatctttgtgcgcctgttttataaccccctcccccaagtttgtaatttagaagcaaagtaccgtaacgatcaacagcaggcgtggcgtaccagccatgtctcgatcaagcacttctgtttccccggacagagtatcaatagactactcacgtggttgaaggagaaaacgtccgttatccggctaactacttcgagaaacctagtaacaccattgaagctgcagagcgtttcgctcagcacttaccccgtgtagatcaggtcgatgagtcactgcattccccacgggcgaccgtggcagtggctgcgttggcggcctgcctatggggtcacccataggacgctctaatgtggacatggtgcgaagagtctattgagctagttagtagtcctccggcccctgaatgcggctaatcctaactgcggagcgcataccctcaaaccagggggtggtgcgtcgtaacgggtaactctgcagcggaaccgactactttgggtgtccgtgtttccttttattttcttactggctgcttatggtgacaattgaagaattgttgccatatagctattggattggccatccggtgtgtaacagagcaatcatctatttgtttgtcgggtatatcccactaacgctcaactcttttaacacattacagtatatactaatcctgaatacaagaaa

SEQ ID NO: 263 - DNA, 721 bp, Coxsackievirus A8
  source 1..721: isolate = C177/CHW/AUS/2017; mol_type = genomic DNA
ccactcacagggcccactgggcgctagcactctggtaatacgttacctttgtgcgcctgttttatctccccctaccctggaacaccttagaagcaaagcatctctgatcaatagaaggtgcagcgaaccagctgcgtctcgatcaagcacttctgtttccccggactgagtatcaatagactgctaacgcggtcgaaggagaaaacgttcgttatccggctagctacttcgagaagcctagtaacaccatgaaagttgcagagtgtttcactcagcacttcccccgtgtagatcaggtcgatgagtcaccgcgatccccacgggcgaccgtggcggtggctgcgttggcggcctgcctatggggcaacccataggacgctctaatacagacatggtgtgaagagcctattgagctagctagtagtcctccggcccctgaatgcggctaatcctaactgcggagcacatgctcgtgaaccagcgagtagtgtgtcgtaatgggcaactctgcagcggaaccgactactttgggtgtccgtgtttctttttattttctctattggctgcttatggtgacaattaaagaattgttaccatatagctattggattggccatccggtgactaatagagctattatatatctctttgttggatttgtccccttgaggctcactgcttataacacactttgttatatattgactctcaactcagcaaa

SEQ ID NO: 264 - DNA, 747 bp, Coxsackievirus A8
  source 1..747: isolate = CV-A8/P82/2013/China; mol_type = genomic DNA
ttaaaacagcctgtgggttgttcccactcacagggcccactgggcgctagcacactgattctccggtacctttgtgtgcttgttttagtatccctcccccaaactcgtaacttagaagaataacacgctatcgatcaatagcaggcatggcgcaccagccatgtctcgatcaagcacttctgtttccccggacagagtatcaatagactactcacgtggttgaaggagaaaacgtccgttatccggctaactacttcgagaaacctagtaacaccattgaagctgcagagcgtttcgttcagcacttaccccgtgtagatcaggtcgatgagtcactgcattccccacgggcgaccgtggcagtggctgcgttggcggcctgcctatggggtcacccataggacgctctaatgtggacatggtgcgaagagtctattgagctagttagtagtcctccggcccctgaatgcggctaatcctaactgcggagcgcataccctcaaaccagggggtagtgcgtcgtaacgggcaactctgcagcggaaccgactactttgggtgtccgtgtttccttttattttcttactggctgcttatggtgacaattgaagaattgttgccatatagctattggattggccatccggtgtgtaacagagcaatcatctatttgtttgccgggtacatcccattaacgctcaactcttttagtacattacagtatatactaatcctgaatacaagaaa

SEQ ID NO: 265 - DNA, 743 bp, Human coxsackievirus A8
  source 1..743: mol_type = genomic DNA; strain = Donovan
ttaaaacagcctgtgggttgcacccacccacagggcccaatgggcgtcagcactctggtaccgaggtacctttgtgcgcctgttttatttccccttcccctgatgcaacttagaagctccgaactaatgatcaatagtaggtgtggcacgccagccacatcttgatcaagcacttctgtttacccggaccgagtatcaataagctgcgcaagcggctgaaggagaaagcgttcgttatccggccaactacttcgagaagcttagtaccaccatgaacgttgcagagtgtttcgttcagcacaaccccggtgtagatcaggccgatgagtcaccgcgttccccatgggcgaccatggcggtggctgcgttggcggcctgcccatggagcaatccatgggacgctctaatactgacatggtgcgaagagcctattgagctagttggtgatcctccggcccctgaatgcggctaatcctaactgcggagcatgcgcccacaagccagtgggtggtgtgtcgtaacgggtaactctgcagcggaaccgactactttgggtgtccgtgtttccttttatctttacattggctgcttatggtgacaattgaagaattgttaccatatagctattggattggccatccggtgtgcaatagagcgattatatacctatttgttggatttgttccattgacatatagatctcttaacactctacaacacatcttgatcttgaacacgagaaa

SEQ ID NO: 266 - DNA, 726 bp, Coxsackievirus A10
  source 1..726: isolate = TA111R; mol_type = genomic DNA
gtgggggtatcacagggcccactgggcgctagcactctgattctgcggaatctttgtgcgcctgttttataacctccccgaaacttgcaacttagaagttatgtacgttactgatcaatagcaggcgtggcacaccagccatgtcttgatcaagcacttctgtacccccggactgagtatcaatagactgctcacgtggtcgaaggagaaaacgttcgttatccggctaactacttcgagaaacctagtaacaccactgaaactgcggagtgtttcgctcagcacttcccccgtgtagatcaggtcgatgagccactgcttaccccacgggtgaccgtggcagtggctgcgttggcggcctgcctatggggcaacccataggacgctctaaagtggacatggtgcgaagagtctattgagctagttagtagtcctccggcccctgaatgcggctaatcctaactgcggagcgcatgcccccaaaccagagggtggtgcgtcgtaacgggtaactctgcagcggaaccgactactttgggtgtccgtgtttcttttattctcataatggctgcttatggtgacaattgaggaattgttaccatatagctattggattggccatccggtgtgcaacagagctattatctacttgtttgttggatacattccattaacacccaaatccttcaatacattgcattacattctaacgctgaacgcaagaaa

SEQ ID NO: 267 - DNA, 747 bp, Coxsackievirus A10
  source 1..747: mol_type = genomic DNA; strain = CA10/JX2545/2017
tttaaaacagcctgtgggttgtacccacccacagggcccactgggcgctagcactccgattctgcggaatctttgtgcgcctgttttataaccctcccccgaaacttgtaatttagaagttatgtacgttactgatcaacagcaggcgtggcacaccagccatgtcttgatcaagcacttctgtaaccccggactgagtatcaatagactgctcacgtggtcgaaagagaaaacgttcgttacccggctaactacttcgagaaacctagtagcaccactgaagctgcggagtgtttcgctcaacacttcccccgtgtagatcaggtcgatgagtcactgcttaccccacgggtgaccgtggcagtggctgcgttggcggcctgcctatggggcaacccataggacgctctaaagtggacatggtgtgaagagtctattgagctagttagtagtcctccggcccctgaatgcggctaatcctaactgcggagcgcatgcccccaaaccagagggtggtgcgtcgtaacgggtaactctgcagcggaaccgactactttgggtgtccgtgtttcttttattcttataatggctgcttatggtgacaattgaggaattgttaccatatagctattggattggccatccggtgtgcaacagagctattatctacttgtttgttggtttcattccattgacacctaaatccttcaatacattgcactatattctaacgttgaacgcaagaaa

SEQ ID NO: 268 - DNA, 740 bp, Coxsackievirus A12
  source 1..740: isolate = D89; mol_type = genomic DNA
ttaaaacagcctgtgggttgcacccactcacagggcccactgggcgtcagcactctggtacctcggtacctttgtgcgcctgttttatatcccccccccattgaaacttagaagcaatgcacttcgatcaatagcgggcgcggcgcaccagccacgtcatgatcaagcacttctgtttccccggaccgagtatcaatagactgctaacgcggttgagggagaaaacgtccgttacccggccaactgcttcgagaaatccagtaacatcatgaaaattgcagagtgtttcgctcagcacttccccagtgtagatcaggtcgatgagtcaccgcgttcctcacgggcgaccgtggcggtggctgcgttggcggcctgcctgtggggcaacccgcaggacgctctaatatggacatggtgtgaagaatctattgagccagttggtagtcctccggcccctgaatgcggctaatcctaactgcggagcacgcgccctcaatccagtgggtagcgtgtcgtaatgggtaactctgcagcggaaccgactactttgggtgtccgtgtttccttttattcttacattggctgcttatggtgacaattgagagattgttaccatatagctattggattggccatccggtatcgaatagagcggttatctatcaatttattggatttactccgttgagtgtgcagcagtatcgcactttgcttttaatagtgagactgaatagtgcaaa

SEQ ID NO: 269 - DNA, 739 bp, Coxsackievirus A12
  source 1..739: mol_type = genomic DNA; strain = QD-LXH535/SD/CHN/2009
ttaaaacagcctgtgggttgcacccactcacagggcccactgggcgtcagcactctggtacctcggtacctttgtgcgcctgttttatatccccccccattgaaacttagaagcaatgcacctcgatcaatagcgggcgtggcgcaccagccacgtcatgatcaagcacttctgtttccccggaccgagtatcaatagactgctaacgcggttgagggagaaaacgtccgttacccggccaactgcttcgagaaatccagtaacatcatgaaaattgcagagtgtttcgctcagcacttccccagtgtagatcaggtcgatgagtcaccgcgttccccacgggcgaccgtggcggtggctgcgttggcggcctgcctgtggagcaacccacaggacgctctaatatagacatggtgtgaagaatctattgagccagttggtagtcctccggcccctgaatgcggctaatcctaactgcggagcacgtgccctcaatccagtgggtagcgtgtcgtaatgggtaactctgcagcggaaccgactactttgggtgtccgtgtttccatttattcttacattggctgcttatggtgacaattgaaagattgttgccatatagctattggattggccatccggtatcgaatagagcggttatctatcagtttattggatttatcccgttgagtgtgcagcagtatcgcactttgcttttaatagtgagactgaatagtataaa

SEQ ID NO: 270 - DNA, 750 bp, Coxsackievirus A14
  source 1..750: mol_type = genomic DNA; strain = MAD-72-07
ttaaaacagctctggggttgtacccactcacagggcccactgggcgctagcactctgattctacggaatccttgtgcgcctgttttataaccccctcccaatatgtaacttagaagcagcacatactaccgatcaatagtgggcatggcgcaccagccatgtctcgatcaagcacttctgtttccccggactaagtatcaatagactgctcacgcggttgaaggagaaagcgtccgttacccggctaactacttcgagaaacccagtagcaccactgaagctgcagagtgtttcgctcagcacttcccccgtgtagatcaggtcgatgagtcaccgcaatccccacgggcgaccgtggcggtggctgcgtggcggcctgcctgtggggcaacccacaggacgctctaaagtggacatggtgcgaagagtctattgagctagttagtagtcctccggcccctgaatgcggctaatcctaactgcggagcgcatgccttcaaaccagatggtagtgcgtcgtaatgggcaactctgcagcggaaccgactactttgggtgtccgtgtttccttttattcttacattggctgcttatggtgacaatcacagaattgttaccatatagctattggattggccatccggtgtgtaatagagcaataatttactcttttgttgcttttgttccattgaccttcactacactgaacactttacagtacatacttcaactcaactccagaaagcaatc

SEQ ID NO: 271 - DNA, 708 bp, Coxsackievirus A14
  source 1..708: isolate = SEN-14-254; mol_type = genomic DNA
ggggccggagctctggtgatacgttacctttgtgcgcctgttttatttccctaccccggaacaatctagaagcaacgcgctactggccaatagaaagtgtagcaaaccagctacatcccggtcaagcacttctgtctccccggaccgagtatcaataaactgctaacgcggttgaaggagaaaaggttcgttacccggccaactacttcgaaaagcccagtaacaccatgaaagttgcagagtgtttcgctcagcacttcccccgtgtagatcaggtcgatgagtcaccgcgatccccacgggcgaccgtggcggtggctgcgttggcggcctgcctatggggcaacccataggacgctctaatacagacatggtgcgaagagcctattgagctagttggtagtcctccggcccctgaatgcggctaatcctaactgcggagcttatgctcgcgaaccagcgagtagtgagtcgtaacgggtaactctgcagcggaaccgactactttgggtgtccgtgtttccttttattctcatattggctgcttatggtgacaatcaaagaattgttaccatatagctattggattggccatccggtgtgcaacagagctattgtctactcttttgttggatttgttccattgtcctctttcaccacactaaatactctacagtatatactttcccttaattcaaggaaacgatc

SEQ ID NO: 272 - DNA, 755 bp, Human coxsackievirus A14
  source 1..755: mol_type = genomic DNA; strain = G-14
ttaaaacagcctgtgggttgtacccacccacagggcccactgggcgctagcacactgattctgcgggatctttgtgcgcctgttttatatcccctccccccaaactaggtaacttagaagattagcacttgtatgaccaatagtaggcgtgacgcgccagtcatgtcttggtcaagcacttctgtttccccggactgagtatcaataagctgcttgcgcggctgaaggagaaaacgttcgttacccggctaactacttcgagaaacctagtaacaccatgaaagttgcggagtgtttcgctcagcacttcccccgtgtagatcaggtcgatgagtcactgcaaaccccacgggtgaccgtggcagtggctgcgttggcggcctgcctatgggtcaacccataggacgctctaatacagacatggtgtgaagagtctattgagctagttagtagtcctccggcccctgaatgcggctaatcctaactgcggagcacacgcttgcaaaccagtgagtagtgtgtcgtaatgggcaactctgcagcggaaccgactactttgggtgtccgtgtttccttttattctcatactggctgcttatggtgacaattgaagaattgttactatatagctattggattggccatccggtgtgtaacagagcgataatctactcctttgttgcatttgttccactaacccttactacattagacattctacaatacatactttatctcaactccaagaaacgaac

SEQ ID NO: 273 - DNA, 744 bp, Coxsackievirus A16
  source 1..744: isolate = AH17-18/AH/East/CHN/2017-02-12; mol_type = genomic DNA
ttaaaacagctctggggttgtccccacccacagggcccactgggcgctagcacactggttctgcgggacctttgtgcgcctgttttataacccttccctaagcagtaacttagaagctttgtacaatcatggccaatagtgggcgtggcgcgccagtcacgtcttggtcaagcacttctgtatccccggactgagtatcaatagactgctcacgcggttgaaggagaaaacgttcgttacccggctaactacttcgagaaacctagtagcaccatgaaagttgcggagtgtttcgctcagcacttcccccgtgtagatcaggtcgatgagccactgtaaaccccacgggcgaccgtgacagtggctgcgttggcggcctgcccatggggtaacccatgggacgctctaatacagacatggtgcgaagagtctattgagctagttagcagtcctccggcccctgaatgcggctaatcctaactgcggagcgcgcaccttcaacccagggggcggcgcgtcgtaatgggtaactctgcagcggaaccgactactttgggtgtccgtgtttccttttattctttattggctgcttatggtgacaattgaaaagttgttaccatatagctattggattggccatccggtgtctaacagagctattgtttacctattcattggctttgtccctcttaatctcaaggccatccaaactctcgattacatattgctcctcagctgtaagaa

SEQ ID NO: 274 - DNA, 730 bp, Coxsackievirus A16
  source 1..730: isolate = CV-A16/HVN08.039_HA_GIANGVNM/2008; mol_type = genomic DNA
ggttgttcccacccacagggcccactgggcgctagcacactgattctacgggatctttgtgcgcctgttttataacccttcccctaagcagcaacttagaagctttgtacaatcacgaccagtagtgggcgtggcgcgccagtcacgtcttggtcaagcacttctgtatccccggactgagtatcaatagactgctcacgcggttgaaggagaaaacgttcgttacccggctaactacttcgagaaacctagtagcaccgtgaaagttgcggagtgtttcgctcagcacttcccccgtgtagatcaggtcgatgagtcactgtaaaccccacgggcgaccgtgacagtggctgcgttggcggcctgcccatggggtaacccatgggacgctctaatacagacatggtgtgaagagtctattgagctagttagtagtcctccggcccctgaatgcggctaatcctaactgcggagcgcgcaccctcaacccagggggcggcgtgtcgtaatgggtaactctgcagcggaaccgactactttgggtgtccgtgtttccttttattccttattggctgcttatggtgacaattgaaaagttgttaccatatagctattggattggccatccggtgtctaatagagctattgtttacctatttattggatacgtccctcttaatctcaaagccattcaaactcttgattatatattgctccttaactgtaagag

SEQ ID NO: 275 - DNA, 742 bp, Coxsackievirus B1
  source 1..742: mol_type = genomic DNA; strain = RO-98-1-74
ttaaaacagcctgggggttgttcccacccacagggcccactgggcgctggcacactggtattacggtacctttgtgcgcctgttttatttacccttccccaatgcaacttagaagtataactcaaacggtcaacagataactcagtatgccagctgagcctagaccaagcacttctgttaccccggaccgagtatcaataagctgctcgcgcggctgaaggagaaaaagttcgttacccggccaattacttcgagaaacttagtaccaccatggaggttgcgcagtgtttcgctccacacacccccagtgtagatcaggccgatgagtcaccgcgttccccacgggcgaccgtggcggtggctgcgttggcggcctgcccatggggcaacccatgggacgcttcaatactgacatggtgcgaagagtctattgagctaattggtagtcctccggcccctgaatgcggctaatcctaactgcggagcagatacccacgcgccagtgggcagtctgtcgtaatgggcaactctgcagcggaaccgactactttgggtgtccgtgtttccttttattcttgtattggctgcttatggtgacaattgagagattgttaccatatagctattggattggccatccggtgacaaacagggcgatcatctatttgtttgttggttttataccattgaactacaaagtcctagatactcttaaccttatattaaaatttaacacattaaa

SEQ ID NO: 276 - DNA, 734 bp, Coxsackievirus B1
  source 1..734: mol_type = genomic DNA; strain = CVB1/XM0108
tcctgtgggttgatcccacccacagggcccactgggcgctagcacactggtattccggtacctttgtgcgcctgttttatacacccttcccaagtgtaacttagaagcttatcacacacggtcaacaggtgactcagtatgccaactgggtcttgatcaagcacttctgtttccccggactgagtatcaataagctgctcacgcggctgaaggagaaaacgttcgttaaccggccaattacttcgagaaacctagtaacaccatggaggttgcgcagtgtttcgctccacacaaccccagtgtagatcaggccgatgagtcaccgcactcctcacgggcgaccgtggcggtggctgcgctggcggcctgcccatgggataacccatgggacgcttcaatactgacatggtgcgaagagtctattgagctaattggtagtcctccggcccctgaatgcggctaatcctaactgcggagcagatacccacacgccagtgggcagtctgtcgtaatgggcaactctgcagcggaaccgactactttgggtgtccgtgtttccttttatttttatactggctgcttatggtgacaattgagagattgttaccatatagctattggattggccatccagtgacaaacagagcgattatttatttatttgttggttatatcccattaagccaaaaggccctagttactctcaactttatactattgcttaatacaacgaa

SEQ ID NO: 277 - DNA, 741 bp, Coxsackievirus B1
  source 1..741: mol_type = genomic DNA; strain = B1/Groningen/2011
taaaacagcctgtgggttgttcccacccacagggcccattgggcgctagcacactgatatcacggtacctttgtgcgcctgttttatctacccctccccgatgcaacttagaagcatgttacaaacggtcaataggtggttcagttaaccaactgagcctcgaccaagcacttctgttaccccggactgagtatcaataggctgctcgcgtggctgatggagaaaacgtccgttacccggccaattacttcgagaaacctagtaccaccatggaagttgcgcagcgtttcgctccgcacaaccccagtgtagatcaggtcgatgagtcactgcgttccccacgggtgaccgtggcagtggctgcgttggcggcctgcccatggggtatcccatgggacgcttcaatactgacatggtgtgaagagtctattgagctaattggtagtcctccggcccctgaatgcggctaatcctaactgcggagcagatacccacgcaccagtgggcagtctgtcgtaacgggcaactctgcagcggaaccgactactttgggtgaccgtgtttccttttattttaatattggctgcttatggtgacaattgaaagattgttgccatatagctattggattggccatccggtaacaaacagagcaattatttacctgtttattggttttatacctctcaaccacaaggttataagtactctcaaccttgttttagcatttaacacagcaaa

SEQ ID NO: 278 - DNA, 735 bp, Coxsackievirus B2
  source 1..735: mol_type = genomic DNA; strain = 13-2380-2_B2
agcctgtgggttgcacccacccacagggcccactgggcgccagcactctggtactgcggtacctttgtgcgcctgttttatcaccccaccccatccggaacgtagaagctagacttaaatggtcaatagacggcccagtatgccaattgggtctcgaccaagcactcctgtttccccgggtttagtatcaataagctgctcacgtggctgaaggagaaaacacccgttatccggccaactacttcgagaaacttagtaccgctatgaacgttgcaaggcgtttcgctcagcacttcccccgtgtagatcaggccgatgagtcaccgcattcctcacgggcgaccgtggcggtggctgcgctggcggcctgcctatgggcttgcccataggacgccttaatactgacatggtgcgaagagtctattgagctagttggtagtcctccggcccctgaatgcggctaatcctaactgcggagcacatactcacaaaccagtgagcagtgtgtcgtaacgggcaactctgcagcggaaccgactactttgggtgtccgtgtttccttttattcctacactggctgcttatggtgacaattaaagaattgttaccatatagctattggattggccatccggtgtctaacagagctattatatacttgtttgttggattcataccacttgattccaatagctataacaccctactttacatcgttcatttgaacacgagaaa

SEQ ID NO: 279 - DNA, 720 bp, Coxsackievirus B2
  source 1..720: mol_type = genomic DNA; strain = 14L
cccacccacagggcccactgggcgtcagcacactggtattgcggtacccttgtgcgcctgttttatccaccccacccaaaagcaacttagaagcacgtcatatacggtcaataggcggcccagcactccaactgggtctcgaccaagcacttctgttaccccggaccgagtatcaataggctgctcacgcggctgagggagaaagcgttcgttacccgaccaattacttcgagaaacctagtaccaccatgaaggttgcgcagcgtttcgttccgcacaaccccagtgtagatcaggccgatgagtcaccgcattccccacgggcgaccgtggcggtggctgcgttggcggcctgcccatggggcaacccatgggacgcttcgatactgacatggtgtgaagagtctattgagctaattggtagtcctccggcccctgaatgcggctaatcctaactgcggagcagatacccacaaaccagtgggcggtctgtcgtaacgggcaactctgcagcggaaccgactactttgggtgtccgtgtttccttttattcttgtattggctgcttatggtgacaattgagagattgttaccatatagctattggattggccatccggtgacaaatagagcaatcatctatctattcgttggttttgtaccgctaacctttaaagttttaaaaactttaaatttcattttagccctaaacatagcaaa

SEQ ID NO: 280 - DNA, 742 bp, Coxsackievirus B2
  source 1..742: mol_type = genomic DNA; strain = 08-749-Shimane08-JPN
ataaaacagcctgtgggttgttcccacccacagggcccactgggcgtttgcacactggtatcgcggtacctttgtgcgcctgttttatccaccctcccctaattgaatttagaagtcaagcacaaccggtcaacagatagcccagcataccagctgggtttcgaccaagcacttctgtttacccgggctgagtatcaataggctgctcacgcggctgaaggagaaaacgttcgttacccggccaattacttcgagaaacctagtaccgccatggacgttgcgcagcgtttcgttccacacaaccccagtgtagatcaggtcgatgagtcaccgcatcccccacgggtgaccgtggcggtggctgcgctggcggcctgcccatggggtaacccatgggacgcttcaatgctgacatggtgcgaagagtctattgagctaattggtagtcctccggcccctgaatgcggctaatcctaactgcggagcagacacccacacgccagtgggcagtctgtcgtaacgggcaactccgcagcggaaccgactactttgggtgtccgtgtttccttttattctttcattggctgcttatggtgacaattgagaggttgttaccatatagctattggattggccatccggtgagcaacagagcaattatatttctttttgttggatatataccacttgactctaataactacaataccctgctttatattctccaattgaatacgaaaag

SEQ ID NO: 281 - DNA, 742 bp, Coxsackievirus B2
  source 1..742: mol_type = genomic DNA; strain = RW41-2/YN/CHN/2012
ttaaaacaccctgtgggttgttcccacccacagggcccatagggcgctagcacactggtattgcggtacctttgtgcgcctgttttattcatccttccccaatggaacttagaagcttaactcaaccggtcaatagacagcccagtacaccaactgggttacgaccaggcactcctgtttccccggactgagtatcaataagctgctcacgcggctgaaggagaaaacgttcgttacccggccaattacttcgagaaacctagtaccgccatggacgttgcgcagtgtttcgctccgcacaaccccagtgtagatcaggtcgatgagtcaccgcgatcctcacgggcgaccgtggcggtggctgcgctggcggcctgcccatggggcaacccatgggacgcttcaatactgacatggtgtgaagagtctatcgagctaattggtagtcctccggcccctgaatgcggctaatcctaactgcggggcagatacccacacgccagtgggcagtctgtcgtaacgggcaactccgcagcggaaccgactactttgggtgtccgtgtttccttttattcttatattggctgcttatggtgacaattgaaagattgttgccatatagctattggattggccatccagtcagtaatagagcaattatatttctttttgttgggtttgtaccacttgatattaacaattataacaccttactatacatcgtccatttgaacacaagaaa

SEQ ID NO: 282 - DNA, 688 bp, Coxsackievirus B2
  source 1..688: isolate = BCH314; mol_type = genomic DNA
tggtattgcggtacctttgtgcgcctgttttattcacccttccccaatgaaacttagaagtttaactcaaccggtcgatagacagcccagtacaccaactgggttttgaccaagtactcctgttttccccggactgagtatcaataagctgctcgcgcggctgaaggagaaaacgttcgttacccggccaattacttcgagaaacctagtaccaccatggacgttgcgcagtgtttcgctccgcacaaccccagtgtagatcaggtcgatgagtcaccgcaatccccacgggcgaccgtggcggtggctgcgctggcggcctgcccatggggcaacccatgggacgcttcaatactgacatggtgcgaagagtctattgagctaattggtagtcctccggcccctgaatgcggctaatcctaactgcggggcagatacccacacgccagtgggcagtctgtcgtaacgggtaactccgcagcggaaccgactactttgggtgtccgtgtttccttttattcttatattggctgcttatggtgacaattgaaagattgttgccatatagctattggattggccatccagtcagcaatagagcaattatatttctttttgttgggtttgtaccacttgataataacaactacaacaccttactatacattatccatttgaacacgagaaa

SEQ ID NO: 283 - DNA, 728 bp, Coxsackievirus B3
  source 1..728: isolate = B307; mol_type = genomic DNA
gagggttccatgcccacagggcccactgggcgctagcacactggtatcgtggtacctttgtgcgcctgttttatccaccctgaccccaaggcaacgtagaagcataccactaaaggtcaataggcgatccagcactccagctgggttaagaccaagcacttctgttaccccggaccgagtaccaataagctgctcacgcggctgaaggggaaagcgttcgttacccaaccaattacttcgagaaacctagtaccaccgtgaaagttgcgcagcgtttcgctcagcacaaccccagtgtagatcaggttgatgagtcaccgcattccccacgggcgaccgtggcggtggctgcgttggcggcctgcccatggggcaacccatgggacgcttcaatactgacatggtgtgaagagtctattgagctaattggtaatcctccggcccctgaatgcggctaatcctaactgcggagcagatacccacacaccagtgggcagtctgtcgtaatgggtaactctgcagcggaaccgactactttgggtgtccgtgtttccttttaacttatactggctgcttatggtgacaattgatagattgttaccatatagctattggattggccatccagtgacaagcagagctatcatttacctgtttgttggttttgtcccattgaattttaaggttctaaaaactattgactttatcttagcactcaatacggcaaa

SEQ ID NO: 284 - DNA, 742 bp, Coxsackievirus B3
  source 1..742: isolate = 2001-5; mol_type = genomic DNA
ttaaaacagcctgtgggttgttcccacccacagggcccactgggcgctagcacactggtattgcggtacctttgtgcgcctgttttatccaccctccccaaccgtaatttagaagcacgaacaatgtggtcaacaggcaacccagtgcaccaactgggtcttgaccaagcacttctgttacccccggactgagtatcaataagctgctcgcgtggctgaaagagaaaacgttcgttacccggccaattacttcgagaaacctagtatcaccatggaagttgcgcagtgtttcgctccgcacaaccccagtgtagatcaggtcgatgagtcaccgcaaccctcacgggtgaccgtggcggtggctgcgctggcggcctgcccgtggggcaacccatgggacgcttcaatactgacatggtgtgaagagtctattgagctaattggtagtcctccggcccctgaatgcggctaatcctaactgcggagcagatatccacacaccagtggacagtctgtcgtaatgggcaactctgcagcggaaccgactactttgggtgtccgtgtttccttttatcttttattggctgcttatggtgacaattgagagattgttaccatatagctattggattggccatccggtgagcaacagagcagttgtattcctctttgttggatttgtaccattaaactataataactacaacaccctactttacattatccacttaaacacacggaa

SEQ ID NO: 285 - DNA, 742 bp, Coxsackievirus B3
  source 1..742: isolate = DH09Y/JS/2012; mol_type = genomic DNA
ttaaaacagcctgtgggttgttcccacccacagggcccactgggcgctagcacactggtattgcggtacctttgtgcgcctgttttatccgccctccccagcagtaacctagaagcatgaataatgtggtcaataggaagctcagtaaaccaactgggtcttgaccaaacacttctgttaccccggactgagtatcaagaagctgctcgcgtggctgaaggagaaaacgttcgttacccggccaattacttcgagaaacccagtaccaccatggaagttgcgcagcgtttcgctccgcacaaccccagtgtagatcaggtcgatgagtcaccgcaatcctcacgggtgaccgtggcggtggctgcgctggcggcctgcccatggggcaacccatgggacgcttcaatactgacatggtgcgaagagtctattgagctaattggtagtcctccggcccctgaatgcggctaatcctaactgcggagcagatatccacacaccagtggacagtctgtcgtaatgggcaactctgcagcggaaccgactactttgggtgtccgtgtttccttttatctttatattggctgcttatggtgacaattgagagattgttaccatatagctattggattggccatccggtgagcaacagagcaattgtattcctctttgtaggatttgtgccgttgaattacaacaactacaacaccttactctacatcatccacttaaacacgcggaa

SEQ ID NO: 286 - DNA, 731 bp, Coxsackievirus B4
  source 1..731: isolate = B401; mol_type = genomic DNA
gtgggttgttcccacccgcagggcccactgggcgctagcacactggtatcacggtacctttgtgcgcctgttttacctccctcccccccagatgcaacttagaagcagcacttcacgaccaatagcaggcgtggcataccagctatgtcttggtcaagcacttctgtaaccccggactgagtatcaataaactgctcacgcggtcgaaagagaaaacgtccgttacccggctaactacttcgagaaacctagtagtgccatgaaagttgcgaagtgtttcgctcagcacatccccagtgtagatcaggtcgatgagtcaccgcattccccacaggtaactgtggcggtggctgcgttggcggcctgcccatggggtgacccatgggacgcttcaatacagacatggtgtgaagagtctattgagctagttagtagtcctccggcccctgaatgcggctaatcctaactgtggagcatgtgcccccactccagggggtagcgtgtcgtaacgggtaactccgcagcggaaccgactactttgggtgtccgtgtttccttttattcttacattggctgcttatggtgacaattgaaagattgttaccatatagctattggattggccacccggtgacaaacagagctataatctaccaatttgtgggatttgttccaataagtttgagagtcttaaagacacttaatttgatattactactcaatagtgcaaa

SEQ ID NO: 287 - DNA, 739 bp, Coxsackievirus B4
  source 1..739: isolate = CV-B4/P11/2013/China; mol_type = genomic DNA
ttaaaacaggctgtgggttggccatccggtgagcccactgggcgctagcacactggtatcacggtacctttgtgcgcctgttttacttcccttccctatatgtaacttagaagcagcactctacgaccaatagtaggcgtggcacaccagccatgtcttggtcaagcacttctgtaaccccggaccgagtatcaatagactgctcacgcggtcgaaggagaaaacgtccgttacccgaccaactacttcgagaaacctagtaacgccatgaaaattgcgaggtgtttcgctcagcacgcccccagtgtagatcaggtcgatgagtcaccgcgttccccacaggtgactgtggcggtggctgcgttggcggcctgcccatggggtgacccatgggacgcttcaatacggacatggtgtgaagagtctattgagctagttggtagtcctccggcccctgaatgcggctaatcctaactgtggagcacgcgcccccgctccagagggtagcgtgtcgtaacgggtaactccgcagcggaaccgactactttgggtgtccgtgtttccttttattcttatactggctgcttatggtgacaattgaaagattgttaccatatagctattggattggccacccggtgacaaacagagcaataatttatcaatttgtagggtttgttccaataaatttgaaagtcttgaagacacttaatttaatattactactcaatagtgcaaa

SEQ ID NO: 288 - DNA, 744 bp, Coxsackievirus B4
  source 1..744: isolate = Edwards CB4; mol_type = genomic DNA
ttaaaacagcctgtgggttgtacccacccacagggcccactgggcgttagcacactggtatcccggtacctttgtgcgcctgttttatatccccttccccatgttgtaacttagaagcaatacaatttcggtcagtagctgacgcgacaaaccagttgcgttttgaccaagcacctctgtgaccccggaccgagtatcaataagctgcttgcgcggctgaaggagaaaccgttcgttacccggctaactacttcgaaaaccctagtaacaccatgaacgttgcggagtgtttcgctcagcacttcccccgtgtagttcaggtcgatgagtcaccgcgttctccacgggtgaccgtggcggtggctgcgttggcggcctgcctgtggggcaacccacaggacgctctaatacagacatggtgcgaagagtctattgagctagttagtagtcctccggcccctgaatgcggctaatcctaactgcggagcacatgcccacaaaccagtgggtggtgtgtcgtaacgggtaactctgcagcggaaccgactactttgggtgtccgtgtttctatttattcctatactggctgcttatggtgacaattgagagattgttgccatatagctattggattggccatccggtgtcgaatagagcaattatttacctatttgttggtttcatacccttaaaccttaaagtttttaagactcttagtcttatactacaatttaactcagtaaa

SEQ ID NO: 289 - DNA, 730 bp, Coxsackievirus B5
  source 1..730: isolate = B501; mol_type = genomic DNA
gtgggttgttcccacccatagggcccactgggcgccagcacactggtatcacggtacctttgtgcgcctgttttacctgcccttccccaacgtaacctagaagcatgatccatgcggtcaatagccggctcggtgcaccaaccgggtcacgaccaagcacttctgttaccccggactgagtatcaataggctgctcgcgtggctgaaggagaaaacgttcgttacccggccaattacttcgagaaacctagtaccaccttgaaagttgcgcagcgtttcgttccgcacaaccccagtgtagatcaggtcgatgagtcaccgcattccccacgggcgaccgtggcggtggctgcgttggcggcctgcccatggggtgacccatgggacgcttcaatactgacatggtgcgaagagtctattgagctaattggtagtcctccggcccctgaatgcggctaatcctaactgcggagcagatacccacgagccagtgggcagtctgtcgtaatgggtaactctgcagcggaaccgactactttgggtgtccgtgtttccttttaactcaattttggctgcttatggtgacaattgaaagattgttgccatatagctattggattggccatccggtgacaaacagagcaattgtctacctttttgttggttttgttccaataaattttaaagttttaaggaccattaacttaatattggcacttaatacagcaaa

SEQ ID NO: 290 - DNA, 711 bp, Coxsackievirus B5
  source 1..711: mol_type = genomic DNA; strain = USA/MI/2009-23030
agggcccactgggcgccagcactctggtatcacggtacctttgtgcgcctgttttaaaaccctctccccaatttgaaacttagaagcaatacacctcgatcaatagtaggcatgacacgccagccatgtcttgatcaagcacttctgtttccccggactgagtatcaataaactgcttgcgcggtcgaaggagaaaacgtccgttacccgactaactacttcgagaaacccagtaacaccatggaaattgcggagtgtttcactcagcacattcccagtgtagatcaggtcgatgagtcaccgcattccccacgggtgaccgtggcggtggctgcgctggcggcctgcccatggggcaacccatgggacgcttcaatatggacatggtgtgaagagtctattgagctagttagtagtcctccggcccctgaatgcggctaatcctaactgcggagcacgtgcctccattccagggggtggcgtgtcgtaacgggcaactctgcagcggaaccgactactttgggtgtccgtgtttcttttaattttatactggctgcttatggtgacaattgaaagattgttgccatatagctattggattggccatccggtatccaacagagcaattgtgtacctttttgttggatttgtaccacttaccagaacaagttttcatacactgtgttacattattagactaaacacagaaaa

SEQ ID NO: 291 - DNA, 742 bp, Coxsackievirus B6
  source 1..742: isolate = 99148/XZ/CHN/1999; mol_type = genomic DNA
ttaaaacagcctgtgggttgatcccacccacagggcccaacgggcgctagcacactggtattacggtacctttgtgcgcctgttttatccacccctccccaacgcaacttagaagcaaaggaatgatgatcaacaggaagctcagtatgccaactgagtgatgatcaagcacttctgttaccccggaccgagtatcaataagctgctcgcgcggctgaaggagaaaacgttcgttacccggccagctacttcgagaagcccagtaccaccatgaaagttgcgcggcgtttcgctccgcacaaccctagtgtagatcaggtcgatgagtcaccgcgttccccacgggcgaccgtggcggtggctgcgttggcggcctgcccatggggtaacccatgggacgcttcaatactgacatggtgcgaagagtctattgagctagttggtagtcctccggcccctgaatgcggctaatcctaactgcggagcagatacccacgaaccagtgggcagtctgtcgtaatgggcaactctgcagcggaaccgactactttgggtgtccgtgtttccttttattcatttattggctgcttatggtgacaattgagagattgttaccatatagctattggattggccatccggtgacaaacagagcaattgtttacctatttgtgggattcataccactagatcacaaagttctaaacaccctcaattacattcttgtacttaataaattaaa

SEQ ID NO: 292 - DNA, 718 bp, Coxsackievirus B6
  source 1..718: mol_type = genomic DNA; strain = LEV15
cacccacagggcccactgggcgctagcactctggtattgcggtacctttgtgcgcctgttttacccaccctcccccaacgtaacttagaagcctgacatatacggtcacaagccagcccagtacgccaactgggtaccgaccaagcacttctgttaccccggactgagtatcaataagctgccaaagcggctgaaggagaaaacgttcgttatccggccaattacttcgagaaacccagtaacaccatgaaagttgcgtagcgtttcattcagcacaatcccagtgtagatcaggtcgatgagtcaccgcattccccacaggcgactgtggcggtggctgcgttggcggcctgcccatggggcaacccatgggacgcttcaatactgacatggtgcgaagagtctattgagctaattggtagtcctccggcccctgaatgcggctaatcctaactgcggagcaggcactcgcagaccagcgagcagcttgtcgtaatgggcaactccgcagcggaaccgactactttgggtgtccgtgtttcctatttcctttacactggctgcttatggtgacaattgagaaattgttaccatatagctattggagtggccatccggtgactaacagagcaataatatatttgtttgttggctttgtgccacttaatttgaaggttgttaagacgctcaatctgatactacttctaaataaagcaaa

SEQ ID NO: 293 - DNA, 703 bp, Coxsackievirus A9
  source 1..703: mol_type = genomic DNA; strain = A744/YN/CHN/2009
attgggcgcagcactctggtatcacggtacctttgtgcgcctgttttatacaccctccccgaatgtaacttagaagcttcacctagatggtcaatagaaggtccagcacaccagttggattccgaccaagcacttctgttaccccggactgagtatcaataggccgtttgcacggctgaaggagaaaacgttcgttacccggccaattacttcgagaaacctagtaacaccatgaaagttgcgcagtgtttcgctccgcacgaccccggtgtagatcaggtcgatgagccaccgcgttccccacgggcgaccgtggcggtggctgcgctggcggcctgcccatggggcaacccatgggacgcttcaatactgacatggtgcgaagagtctattgagctaattggtagtcctccggcccctgaatgcggctaatcctaactgcggagcaggcaccctcaagccagagggcagcttgtcgtaacgggcaactctgcagcggaaccgactactttgggtgtccgtgtttccttttgttcttgaactggctgcttatggtgacaattgaaagattgttaccatatagctattggattggccatccagtgacaaacagagcgattatatatttgtttgttggttttgttccattaaactataaagccttaaacacacttaaatttgtcttactactcaactcagcaaa

SEQ ID NO: 294 - DNA, 711 bp, Coxsackievirus A9
  source 1..711: isolate = 2-MRS2013; mol_type = genomic DNA
agggcccactgggcgctagcacactggtatcacggtacctttgtgcgcctgttttatttccccatccccgccgtaacttagaagtctcacttaagcggtcaatagatagcccagtaaaccaactgggttccgaccaggcacttctgttaccccggaccgagtatcaataggctactcacgtggccgaaggagaaaacgttcgttacccggccaattacttcgagaaacttagtaacaccatggaagttgcgcagtgtttcgctccgcacaaccccagtgtagatcaggtcgatgagtcaccgcgtaccccacgggcgaccgtggcggtggctgcgttggcggcctgcccatggggcaacccatgggacgcttcaataccgacatggtgcgaagagtctattgagctaattggtagtcctccggcccctgaatgcggctaatcctaactgcggagcagacgcctacgaaccagtgggtagtctgtcgtaacgggcaactctgcagcggaaccgactactttgggtgtccgtgtttccttttattcttacactggctgcttatggtgacaattgagagattgttaccatatagctattggattggccatccggtgacaaacagagctattgtttatctatttattggtttcataccactaaacttcaaggtcctaggaaccctcaatttaatattactacttaatagtgcaaa

SEQ ID NO: 295 - DNA, 698 bp, Coxsackievirus A1
  source 1..698: clone = V18A; mol_type = genomic DNA
gataggttgttccsaccccagaggcccacgtggmggmtagtaykhkggtatcacggtacctttgtacgcctgttttacatcccctccccaagtaactttagaagtaaatcataaagttcaatagaagggggtgcaagccagcaccaccacgaacaagcacttctgtttccccggtgaagccgtatagactgcccccgcggttgaaaatggcagatccgttatccgctcacgtacttcgagaagcctagtatcaccttggaatcttcgacgcgttgcgctcagcactctaccccgagtgtagcttaggtcgatgagtctgggcataccccaccggtgacggtggcccaggctgcgttggcggcctacccatggttaacaccatgggacgctagttgtgaacaaggtgtgaagagcctattgagctacctgagagtcctccggcccctgaatgcggctaatcccaaccacggagcaagtgctcacaaaccagtgggtagcttgtcgtaacgcgcaagtctgtggcggaaccgactactttgggtgtccgtgtttccttttatttttatcatggctgcttatggtgacaatctaagattgttatcatatagctattggattggccatccggtgatttttgaaagtgatatttgccttgctatttcattgcatttgcttacttataatactgcaaactcaca

SEQ ID NO: 296 - DNA, 711 bp, Coxsackievirus A1
  source 1..711: isolate = KS-ZPH01F/XJ/CHN/2011; mol_type = genomic DNA
ttaaaacagctctggggttgttcccaccccagaggcccacgtggcggctagtacactggtatcacggtacctttgtacgcctgttttatatcccctcccccatgcaactttagaagtaattcaaatagttcaatagagggggtacaaaccagtaccaccacgaacaagcacttctgtttccccggtgaggctatatagactgttcccacggtcgaaggtggctgatccgttatccgcttgagtacttcgagaagcctagtaccacctttggatcttcgatgcgttgcgctcagcactctaccccgagtgtagcttaggctgatgagtctgggcataccccaccggcgacggtggcccaggctgcgttggcggcctacccgtggctaacgccatgggacgctagttgtgaacaaggtgtgaagagcctattgagctacttaagagtcctccggcccctgaatgcggctaatcccaaccacggagcaagtgctcacaaaccagtgggtggcttgtcgtaacgcgcaagtctgtggcggaaccgactactttgggtgtccgtgtttccttttatttttatcatggctgcttatggtgacaatctaagattgttgtcatatagcgtttggattggccatccggtgacttcgaaagcgatatatttgactcattgtcttactgaatttacctatttattacacttgtataacaata

SEQ ID NO: 297 - DNA, 747 bp, Coxsackievirus A11
  source 1..747: isolate = CV-A11_66122; mol_type = genomic DNA
ttaaaacagctctggggttgttcccaccccagaggcccacgtggcggccagtacaccggtattacggtacccttgtacgcctgttttatactcccttccccctgtaacttagaagcaataaaccaagttcaacagaagggggtacaaaccagtaccaccacgaacaagcacttctgtttccccggtgaggtcgtatagactgtccccacggtcgaaaacgactaatccgttatccgctcttgtacttcgagaagcctagtatcatcttggaatcttcgatgcgttgcgctcagcactcgaccccggagtgtagcttaggccgatgagtctggacgttccccaccggcgacggtggtccaggctgcgttggcggcctacctgtggcccaaagccacaggacgctagttgtgaacaaggtgtgaagagcctattgagctacatgagagtcctccggcccctgaatgcggctaatcctaaccacggagcaggtagttgcaatccagtaactggcctgtcgtaatgcgtaagtctgtggcggaaccgactactttgggtgtccgtgttyccttttatttttataatggctgcttatggtgacaatcattgattgttatcataaagcgatttggattggccatccggtgagaattagatcaattatctacttatttgttggatttacacccttatctatatacacactaaacctaattagaattaccttgttaattagacattattatcaca

SEQ ID NO: 298 - DNA, 691 bp, Coxsackievirus A13
  source 1..691: clone = V4B; mol_type = genomic DNA
ggtattacggtacccttgtacgcctgttttatactcccctcccccgtaacttagaagacttcaaaatcaaagttcaataggagggggtacaaaccagtaccaccacgaacaagcacttctgtttccccggtgatgttgtatagactgtctccacggtcgaaaacgactgatccgttatccgctctagtacttcgagaagcccagtaccaccttggaatcttcgatgcgttgcgctcagcactcaatcccagagtgtagcttaggttgatgagtctggacgtccctcaccggcgacggtggtccaggctgcgttggcggcctacctgtggcccaaagccacaggacgctagttgtgaacaaggtgcgaagagcctattgagctactagagattcctccggcccctgaatgcggctaatcccaaccacggagcaggtactcacaacccagtgagcagcctgtcgtaacgcgcaagtctgtggcggaaccgactactttgggtgtccgtgtttccttttatttttatatggctgcttatggtgacaatcattgattgttatcataaagcgaattggattggccatccggtgaaagttagacttatcatttacttgtttgttggattcactcctttgactaaattcacccctgacatcatcttagttgtgatactgattaggagacttcatcata

SEQ ID NO: 299 - DNA, 745 bp, Coxsackievirus A13
  source 1..745: mol_type = genomic DNA; strain = BAN01-10637
ttaaaacagcctgtgggttgttcccaccccagaggcccacgtggcggctagtacwcyggtatcacggtacctttgtacgcctgttttatatcccctccccatgcaactttagaagcaattcaacaagttcaatagaagggggtacaaaccagtaccaccacgaacaagcacttctgtttccccggtgatctcgcataagctgtgcccacggctgaaggcaagtgatccgttatccgcttgggtacttcgagaagcctagtaccaccttgggatcttcgatgcgttgcgctcagcactctaccccgagtgtagcttgggccgatgagtctgggcattccccaccggtgacggtggcccaggctgcgttggcggcctacccatggttaacaccatgggacgctagttgtgaacaaggtgtgaagagcctattgagctactcaagaatcctccggcccctgaatgcggctaatcccaaccacggagcaggtgcccccaaaccagagggtggcctgtcgtaacgcgcaagtctgtggcggaaccgactactttgggtgtccgtgtttccttttatctcttatatggctgcttatggtgacaatcatagattgttatcataaagcgaattggattggccatccggtgaagtacaaacacattatctacctatttgttggatttactcctctcacattcaacactcccaagttaatacaaattgttcttttaattagggaaatacaccaca

SEQ ID NO: 300 - DNA, 714 bp, Coxsackievirus A19
  source 1..714: mol_type = genomic DNA; strain = 2019103106/XX/CHN/2019
ttttttaaaacagctctggggttgttcccaccccagaggcccacgtggcggctagtactctggtattaaggtacctttgtacgcctgttttatctcccctcccccaagtaactttagaagtaattcaaacagttcaatagagggggtacaaaccagtaccaccacgaacaagcacttctgtttccccggtgaagctgtatagactgtacccacggtcgaaaacggtagatccgttatccgctcaagtacttcgagaagcctagtattaccttggaatcttcgatgcgttgcactcagcactctacccccgagtgtagcttaggtcgatgagtctgggcataccccaccggtaacggtggcccaggctgcgttggcggcctacccatggctaacgccatgggacgctagttgtgaacaaggtgtgaagagcctattgagctacttgagagtcctccggcccctgaatgcggctaatcccaaccacggagcaagtgcctgcatgccagcaggtagcttgtcgtaacgcgtaagtctgtggcgggaccgactactttgggtgtccgtgtttccttttattcttattatggctgcttatggtgacaatctaagattgttatcatatagcttttggattggccatccggtaattattcgactttcaaacgctcgtttatcttatttcatcacacatccgtttgattaattgactataca

SEQ ID NO: 301 - DNA, 715 bp, Coxsackievirus A19
  source 1..715: mol_type = genomic DNA; strain = 8663
ttaaaacagctctggggttgttcccaccccagaggcccacgtggcggctagtactctggtattacggtacctttgtacgcctgttttacactcccttccctacgcaactttagaagtttaacataaagttcaatagagggggtacaaaccagcaccaccacgaacaagcacttctgtttccccggtgaaactgcatagactgtaaccacggttgaaagcggttgatccgttatccgcttgagtacttcgagaagcctagtaccaccttggaatctccgatgcgttgcgctccacactctaccccgagtgtagcttaggccgatgagtctgggcgttccccaccggcgacggtggcccaggctgcgttggcggcctacccatggttaacgccatgggacgctagttgtgaacaaggtgtgaagagcctattgagctactcaagagtcctccggcccctgaatgcggctaatcccaaccacggagcgagtgctcacaatccagtgagtggcttgtcgtaacgcgcaagtctgtggcggaaccgactactttgggtgtccgtgtttccttttatttttactatggctgcttatggtgacaatctaggattgttatcatatagcttttggattggccatccggtgacttctaacgttcaagtagtttactcgcttaattttctaaacacattctcagttgttgaattataaacttcaca

SEQ ID NO: 302 - DNA, 745 bp, Coxsackievirus A20
  source 1..745: mol_type = genomic DNA; strain = CAM1976
ttaaaacagctctggggttgttcccaccccagaggcccacgtggcggctagtactctggtattacggtacctttgtacgcctgttttatatcccctccccccagtaacttagaaacaaaaaacccaagttcaataggagggggtacaaaccagtaccaccacgaacaagcacttctgttttccccggtgaggttgtatagactgtccccacggtcgaaaatgactgatccgttacccgctcctgtacttcgagaagcccagtaacatcttggaatcttcgatgcgttgcgctcagcactcaaccccagagtgtagcttaggtcgatgagtctggacgctccccaccggcgacggtggtccaggctgcgttggcggcctacctgtggtccaaagccacaggacgttagttgtgaacaaggtgtgaagagcctattgagctacaagagagtcctccggcccctgaatgcggctaatcccaaccatggagcagatgattgcaaaccagcaattggtctgtcgtaatgcgtaagtctgtggcggaaccgactactttgggtgtccgtgtttcctttttactctttaatggctgcttatggtgacaatcacggattgttatcataaagcgaattggattggccatccggtgagaatcagaacgattatttcttcctcgtggatttgtaccaataacaccttacacaccgcacttaatcagagttatattgtgtgagatttcattaccata

SEQ ID NO: 303 - DNA, 689 bp, Coxsackievirus A21
  source 1..689: isolate = 12MYKLU412; mol_type = genomic DNA
caccccagaggcccacgtggcggctagtactctggtatcacggtacctttgtacgcctgttttatatcccttcccccgtaactttagaagcttaacaaaagttcaatagaaggggtgcaaaccagtacctccacgaacaagcacttctgtctccccggtgaagtcacatagactgtacccacggtcaaaagtgattgatccgttatccgcttgagtacttcgagaagcctagtatcaccttggaatcttcgatgcgttgcgctcaacactctaccccgggtgtagcttaggctgatgagtctgggcatcccccaccggtgacggtggcccaggctgcgttggcggcctacccatggctaacgccatgggacgctagttgtgaacaaggtgtgaagagcctattgagctactcaagaatcctccggcccctgaatgcggctaatcccaaccacggagcaatcgctcacgatccagtgagtaggttgtcgtaatgcgcaagttcgtggcggaaccgactactttgggtgtccgtgtttccctttttacttatactggctgcttatggtgacaatttacagattgttaccatatagctattggattggccatccagtattgtgttacatatattaaagtacttttccacaagcaacaactacattgtgtttgaaccacaatagccactacaa

SEQ ID NO: 304 - DNA, 736 bp, Coxsackievirus A21
  source 1..736: mol_type = genomic DNA; strain = NIV17-608-2
ccggggttgttcccaccccggaggcccacgtggcggctagtactctggtaccacggtacccttgtacgcctgttttatatcccctccccacgcaactttagaagaaattcaccaagttcaatagggggggtacgaaccagtaccaccacgaacaagcacttctgtttccccggtgattttacataggctgtacccacggctgaaagtgaatgatccgttacccgcttgagtacttcgagaagcctagtaccaccttggaatctccgatgcgttgcgttcagcactctaacccgagtgtagcttaggctgatgagtctgggcgatccccaccggcgacggtggcccaggctgcgttggcggcctacccgtggctaacgctacgggacgctagttttgaacaaggtgtgaagagcctattgagctacccaagaatcctccggcccctgaatgcggctaatcccaaccatggagcaagtgccctcaagccagggggtggcttgtcgtaacgcgtaagtctgtggcggaaccgactactttgggtgtccgtgtttccttttatttcatatttggctgcttatggtgacaatcacagattgttatcataaagcgaattggattggccatccagtgaaatataagctcattgtttatctccttgttggatttgttctgttaggaaattcctcaataaagttgactcgggtaatcttagtgattagaagtcatcatttcaaca

SEQ ID NO: 305 - DNA, 712 bp, Coxsackievirus A22
  source 1..712: mol_type = genomic DNA; strain = 438913
ttaaaacagctctggggttgatcccaccccagaggcccacgtggcggctagtactctggtattacggtacctttgtacgcctgttttatatcccctcccccaagtaactttagaagcaattcaaacagttcaatagagggggtacaaaccagtaccaccacgaacaagcacttctgtttccccggtgaagctgtatagactgttcccacggttgaaaatggcagatccgttatccgcttgagtacttcgagaagcctagtatcaccttggaatcttcgacgcgttgcgctcagcactctaccccgagtgtagcttaggtcgatgagtctgggcataccccaccggcgacggtggcccaggctgcgttggcggcctacccatggccaacgccatgggacgctagttgtgaacaaggtgagaagagcctattgagctacttaagagtcctccggcccctgaatgcggctaatcccaaccacggagcaagtgctcacaaaccagtgagtagcttgtcgtaacgcgcaagtctgtggcggaaccgactactttgggtgtccgtgtttccttttatttttactatggctgcttatggtgacaatctaagattgttatcatatagctgttggattggccatccggtgatttattgagatttaacgttcgcctgtttttcttactacatctacccaccagtttcactcatataacaaca

SEQ ID NO: 306 - DNA, 747 bp, Coxsackievirus A24
  source 1..747: mol_type = genomic DNA; strain = 20693_84_CV-A24
tttaaaacagctctggggttgttcccaccccagaggcccacgtggcggctagtacactggtattacggtacccttgtacgcctgttttacacccctttcccccgtaacttagaagctttaaatccaagttcaacagtcagtggtacaacccagtactaccacgaacaagcacttctgttaccccggtgagattgcataggccgtccccacggctaaaagcgattgatccgttatccgctcttgtacttcgagaagcctagtaagaccttgggatcctcgatgcgttgcgctcaacactcaaccccagagtgtagcttgggctgatgagtctggacattcctcaccggtgacggtggtccaggctgcgttggcggcctacctgtggcccaaagccacaggacgctagttgtgaacaaggtgtgaagagcctattgagctacaagagagtcctccggcccctgaatgcggctaatcccaaccacggagcaggcgattgcaatccagcaactagcctgtcgtaacgcgcaagtctgtggcggaaccgactactttgggtgtccgtgtttccttttattacataatggctgcttatggtgacaatcacagattgttgtcataaagcgaattggattggccatccggtgagaattaaaacaattatttacttatttgttggatttgttcctatacacacccaaacaccttgcttgattgaagtaattctgttgataagacaacactattaca

SEQ ID NO: 307 - DNA, 734 bp, Coxsackievirus A15
  source 1..734: mol_type = genomic DNA; strain = G-9
ttaaaacagctctggggttgttcccaccccagaggcccacgtggcggctagtacaccggtattacggtacccttgtacgcctgttttatactccctcccccccgtaacttagaagtacaaaactcaagttcaataggagggggtacaaaccagtaccaccacgaacgagcacttctgtctccccggtgaggttacatagactgtccccgcggttgaaagtaaccgatccgttatccgctcttgtccttcgagaagcccagtaccatcttggaatcttcgatgcgttgcgctcaacactcaaccccagagtgtagcttaggtcgatgagtctggacactccccaccggcgacggtggtccaggctgcgttggcggcctacctgtggcccaaagccacaggacgctagttgtgaacaaggtgtgaagagcctattgagctacaagagagtcctccggcccctgaatgcggctaatcccaaccacggagcaggtgacttcaagccagaagttggcctgtcgtaacgcgtaagtctgtggcggaaccgactactttgggtgtccgtgtttccctttattcttacaatggctgcttatggtgacaatcatagattgttatcataaagcgaattggattggccatccggtgagaatcagatcagttacttacctgtttgttggattcactccgttgacactttacatactaacccttgtcaatacacctgtattatcata

SEQ ID NO: 308 - DNA, 747 bp, Coxsackievirus A18
  source 1..747: mol_type = genomic DNA; strain = CAM1972
ttaaaacagctctggggttgttcccaccccagaggcccacgtggcggccagtacactggtattacggtacctttgtacgcctgttttatgctcccttcccctgcaacttagaagattacaaaccaagttcaatagaagggggtgcaaaccagtaccaccacgaacaagcacttctgtttccccggtgaacttgtatagactgtacccacggtcgaaaacgagtgatccgttatccgctcttgtacttcgagaagcccagtaccttcttgggatcattgatgcgttgcgctcagcactcgaccccggagtgtagcttaggctgatgagtctggacatccctcaccggcgacggtggtccaggctgcgttggcggcctacctgtggtccaaagccacaggacgctaaatgtgaacaaggtgtgaagagcctattgagctacatgagagtcctccggcccctgaatgcggctaatcctaaccacggagcaggtggttgcaaaccagcaattggcctgtcgtaatgcgtaagtctgtggcggaaccgactactttgggtgtccgtgtttctctttatttttacaatggctgcttatggtgacaatcttagattgttgtcataaagcgaattggattggccatccggtgaagataaagcatatcatttatctatttattggattcactccattaaactcttggacttatcatttaatacaagtagtgttattgataagaagtgttcaccaca

SEQ ID NO: 309 - DNA, 612 bp, Human rhinovirus A2
  source 1..612: mol_type = genomic DNA; strain = 12L4
ttaaaactggatccaggttgttcccacctggatctcccatagggagtggtactctgctattacggtagccttgtatgccagttttatctcccctcccccatgtaacttagaagttttacacaaggaccaatagtcggtaatcagccagattactaaaggtcaagcacttctgtttccccggtcaatgctgatatgctccaacagggcaaaaacagcagcgatcgttatccgcaaagcgcctacgcaaagcttagtagcatctccgaaattgtctggttggtcgttccgccattttccccttggtagacctggcagatgaggctagaaataccccactggcgacagtgttctagcctgcgtggctgcctgcacaccctatgggtgtgaagccaaacaatggacaaggtgtgaagagccccgtgtgctcgctttgactcctccggcccctgaatgtggctaaccttaaccctgcagctagagcacgcaaaccagcgtgtttctagtcgtaatgagcaattgcgggatgggaccaactactttgggtgtccgtgtttcactttttctttttatattgcttatggtgacaatatatacatcatatatattgacacc

SEQ ID NO: 310 - DNA, 568 bp, Human rhinovirus A2
  source 1..568: mol_type = genomic DNA; strain = USA/2018/CA-RGDS-1062
gggtactctgctattacggtagccttgtatgccggttttacctcccctcccccatgtaacttagaagttttacacaaggaccaatagtcggtaatcagccagattactaaaggtcaagcacttctgtttccccggtcaatgctgatatgctccaacagggcaaaaacagtagcgatcgttatccgcaaagcgcctacgcaaagcttagtagcatctccgaaattgtctggttggtcgttccgccattttccccttggtagaccttgcagatgaggctagaaataccccactggcgacagtgttctagcctgcgtggctgcctgcacaccctatgggtgtgaagccaaacaatggacaaggtgtgaagagccccgtgtgctcgctttgattcctccggcccctgaatgtggctaaccttaaccctgcagctagagcacgcaaaccagcgtgtttctagtcgtaatgagtaattgcgggatgggaccaactactttgggtgtccgtgtttcactttttccttttatattgcttatggtgacaatatatatacagcatatatattgacacc

SEQ ID NO: 311 - DNA, 610 bp, Human rhinovirus A2
  source 1..610: mol_type = genomic DNA; note = Accession: X02316
ttaaaactggatccaggttgttcccacctggatttcccacagggagtggtactctgttattacggtaactttgtacgccagttttatctcccttcccccatgtaacttagaagtttttcacaaagaccaatagccggtaatcagccagattactgaaggtcaagcacttctgtttccccggtcaatgttgatatgctccaacagggcaaaaacaactgcgatcgttaaccgcaaagcgcctacgcaaagcttagtagcatctttgaaatcgtttggctggtcgatccgccatttcccctggtagacctggcagatgaggctagaaataccccactggcgacagtgttctagcctgcgtggctgcctgcacaccctatgggtgtgaagccaaacaatggacaaggtgtgaagagccccgtgtgctcgctttgagtcctccggcccctgaatgtggctaaccttaaccctgcagctagagcacgtaacccaatgtgtatctagtcgtaatgagcaattgcgggatgggaccaactactttgggtgtccgtgtttcactttttcctttatatttgcttatggtgacaatatatacaatatatatattggcacc

SEQ ID NO: 312 - DNA, 618 bp, human rhinovirus a7
  source 1..618: mol_type = genomic DNA; strain = atcc vr-1117
ttaaaactgggagtgggttgttcccactcactccacccacgtggtgctgtacactgttattccggtaactttgtacgccagtttttccctcccttccctcattatgtaacttagaagcatgaacatatggaccaataggcaataatcatccagattattgaaggtcaagcacttctgtttccccggtcaataaagatatgctttacccaaggcaaaaacttttgagatcgttacccgcacatcaactacgcaaagcctagtatcacctttgatgtactaagactggtcgtttcctgcaaccccagcagtagacctggcagatgaggctggacgtaccccactggcgacagtggtccagcctgcgtggctgcctgctcgcccatatgggcgagaagccttattattgacaaggtgtgaagagccgcgtgtgcttggtgtgagtcctccggcccctgaatgtggctaaccttaaccctgcagccattgctcataatccaatgagttagtggtcgtaatgcgcaagtgcgggatgggaccaactactttgggtgtccgtgtttcttatttttctttcatgtgtgttatatggtgacaatttatagtatataagttgtcatc

SEQ ID NO: 313 - DNA, 606 bp, Human rhinovirus A8
  source 1..606: mol_type = genomic DNA; strain = ATCC VR-1118
ttaaaactgggttcaggttgttcccatctgaacttcccacgtggagtagtacactattattacggtaattttgtacgccagttttacctccctccccaaatgtaacttagaagatgtacacaacgaccaacaggcggtggttatccaaaccatcaaaggtcaagcacttctgtttccccggtcaatgttgatatgctccaacagggcaaaaacaactgcgatcgttatccgcaagatgcctacgcaaagcttagtaacactttggaagatttatggctggtcgttccactataccccatagtagacctggcagatgaggctagaaataccccactggtgacagtgttctagcctgcgtggctgcctgcgcaccctatgggtgcgaagccatacattggacaaggtgtgaagagccccgtgtgctcatcttgagtcctccggcccctgaatgtggctaaccttaaccccgcagccagtgcacacaatccagtgtgtttttggtcgtaatgagtaattgtgggatgggaccaactactttgggtgtccgtgtttcactttttcctttattatgcttatggtgacaatatatacatatatattgacacc

SEQ ID NO: 314 - DNA, 613 bp, Human rhinovirus A9
  source 1..613: isolate = isolate F01; mol_type = genomic DNA
ttaaaactggatctgggttgttcccactcaggtctcccacgtggagtagtacactgttattacggtaactttgtacgccagttttacatcccctccccccaagtaacttagaagataagcacacaggccaataggagatgatcagccagatcattatgggccaagcacttctgtttccccggtcgaagttgatatgctccaacagggcaaaaacaactgagatcgttatccgcaaagcgcctacgcaaagcctagtaactatctggaaattacttggttggtcgctccgccataccccatggtagacctggcagatgaggctagaaattccccactggcgacagtgttctagcctgcgtggctgcctgcacaccctttttgggtgtgaagccaagtaatggacagggtgtgaagagccccgtgtgctcgctttgagtcctccggcccctgaatgtggctaaccttaaccccgcagctagagcacacaacccagtgtgtatctagtcgtaatgagcaattgcgggatgggaccaactactttgggtgtccgtgtttcttgtttttcttttatatttgcttatggtgacaatatatagtgatatatattggcatc

SEQ ID NO: 315 - DNA, 612 bp, Human rhinovirus A9
  source 1..612: isolate = F02; mol_type = genomic DNA
ttaaaactggatctgggttgttcccactcaggtctcccacgtggagtagtacactgttattacggtaactttgtacgccagttttatatcccctcccctcaagtaatttagaagataaacacacagaccaataggagatgatcagccagatcattatgggtcaagcacttctgtttccccggtcgaagttgatatgctccaacagggcaaaaacaactgagatcgttatccgcaaagcgcctacgcaaagcctagtaactatctggaaattacttggttggtcgctccgccataccccatggtagacctggcagatgaggctagaaattccccactggcgacagtgttctagcctgcgtggctgcctgcacacccttttgggtgtgaagccaagtaacggacagggtgtgaagagccccgtgtgctcgctttgagtcctccggcccctgaatgtggctaaccttaaccctgcagctagagcacacaacccagtgtgtatctagtcgtaatgagcaattgcgggatgggaccaactactttgggtgtccgtgtttcttgtttttcttttatatttgcttatggtgacaatatatagtgatatatattggcatc

SEQ ID NO: 316 - DNA, 611 bp, Human rhinovirus A9
  source 1..611: mol_type = genomic DNA; strain = ATCC VR-489
ttaaaactggatctgggttgttcccactcagatctcccacgtggagtagtacactattattacggtaatcttgtacgccagttttataatccccttacccaagtaacttagaagataaacacaaagaccaataggagatgatcatccagatcatcataggtcaagcacttctgtttccccggtcaaggttgatatgctctaacagggcaaaaacagctgagatcgttatccgcaaagcgcctacgcaaagcctagtaactatctggaagttgcttggttggtcgctccgccatatcccatggtagacctggcagatgaggctagaaattccccactggtgacagtgttctagcctgcgtggctgcctgcacaccctctgggtgtgaaaccaagtaatggacagggtgtgaagagccccgtgtgctcgctttgagtcctccggcccctgaatgtggctaaccttaaccctgcagctagggcacacaatccagtgtgtatctagtcgtaatgagcaattgcgggatgggaccaactactttgggtgtccgtgtttcttgtttttcttttatgtttgcttatggtgacaatatatagtaatatatrttggcatc

SEQ ID NO: 317 - DNA, 608 bp, Human rhinovirus A10
  source 1..608: mol_type = genomic DNA; strain = ATCC VR-1120
ttaaaactggatccagattgttcccatctggatttcccacgtggagttgtacactattattccggtaattttgtacgccagttttatgtacccccccctgtaacttagaagttttgaacaaggaccaataggcagtaaccacccaggttgctaaaggtcaagcacttctgtttccccggtcaaagttgatatgctccaacagggcaaaaacaactgagatcgttacccgcaaggtgcctacgcaaagcctagtaaccccttgaacgatgtgtggttggtcgttcggctgtaccccacagtagacctggcagatgaggctagatgttccccactggcgacagtgttctagcctgcgtggctgcctgcgcactctctgagtgcgaagccatacatttgacaaggtgtgaagagccccgtgtgctcaccttgagtcctccggcccctgaatgtggctaaccttaaccctgcagctagtacatgcaatccagcatgcagctagtcgtaacgagcaattgcgggacgggaccaactactttgggtgtccgtgtttcactttttccttttatatttgcttatggtgacaatatatagatttatatattgtcacc

SEQ ID NO: 318 - DNA, 595 bp, Human rhinovirus A11
  source 1..595: mol_type = genomic DNA; strain = RvA11/USA/2021/XHZLKL
ccacctggatctcccatgtggagttgtactctattattccggtaattttgtacgccagttttatctccccttccccttttgtaacttagaagatgaactcaccgaccaataggtgacatttatccaaaatgtcaaaggtcaagcacttctgtttccccggtcaaggatgatatgctccaacagggcaaaaacatctgcgatcgttatccgcaaaacaactacgcaaagcctagtaccacttttgaaagtatgtggttggtcgctccactataaacccaatagtagacctggcagatgaggctagaagctccccactggtaacagtgttctagcctgcgtggctgcctgcgtgcctccagtaggcacgaagccatatatttgacaaggtgcgaagagccccgtgtgcttgttttgagtcctccggcccctgaatgtggctaaccttaaccctgcagctagtgtgcacaatccagtgcatggctagtcgtaatgagcaattgcgggatgggaccaactactttgggtgtccgtgtttcttgtttttccttttatttgcttatggtgacaatatatataatacatatatattggcatc

SEQ ID NO: 319 - DNA, 594 bp, Human rhinovirus A11
  source 1..594: mol_type = genomic DNA; strain = SCH-107
ccacgtgggagatccaggtggagttgtactctattattccggtaattttgtacgccagttttatctccccttcccttttgtaacttagaagatgaacttaccgaccaataggtggcatttatccaaaatgtcaaaggtcaagtacttctgtttccccggttaaggatgatatgctccaacagggcaaaaacatctgcgatcgttatccgcaaaacaactacgcaaagcctagtaccacttttgagagtatgtggttggtcgctccactataaacccaatagtagacctggcagatgaggctagaagttccccactggtaacagtgttctagcctgcgtggctgcctgcgtgcctccagtaggcacgaagccatatatttgacaaggtgtgaagagccccgtgtgcttgttttgagtcctccggcccctgaatgtggctaaccttaaccctgcagctagtgtgcgcaatccagtgcatggctagtcgtaatgagcaattgcgggatgggaccaactactttgggtgtccgtgtttcttgtttttccttttatttgcttatggtgacaatatatataatacatatatattggcatc

SEQ ID NO: 320 - DNA, 618 bp, Human rhinovirus A11
  source 1..618: mol_type = genomic DNA; note = Accession: EF173414
ttcaaactggatccaggttgttcccacctggatctcccacgtggagttgtactctattattccggtaattttgtatgccagttttatctccccttcccttttgtaacttagaagatgaactcaccgaccaataggtggcatttatccagaatgtcaaaggtcaagcaccttctgtttccccggtcaaagttgatatgctccaacagggcaaaaacatctgcgatcgttatccgcaaagcaactacgcaaagcctagtatcacttttgagagtatgtggttggtcgctccactataaacccaatagtagacctggcagatgaggctagaagtcccccactggtaacagtgttctagcctgcgtggctgcctgcgtgcctctggtaggcacgaagccatatatttgacaaggtgtgaagagccccgtgtgcttgctttgagtcctccggcccctgaatgtggctaaccttaaccctgcagctagtgtgcataatccaatgcatggctagtcgtaatgagcaattgcgggatgggaccaactactttgggtgtccgtgtttctcatttttccttttatttgcttatggtgacaatatatataatacatatatattggcatc

SEQ ID NO: 321 - DNA, 604 bp, Human rhinovirus A12
  source 1..604: isolate = p211; mol_type = genomic DNA
gttgtggttgatcccaccacactgcccactgggcgtagtgctctcatattccggtatgcttgcacgccagttttattcccccttcccccattgtaacttagaagcaaagcacacatgatcaataggagataacctgccaggttatttaagatcaagcacttctgtttccccggcaagtgtgaatatgctttacccaaggcaaaagctaatcttgtcgttatccgcaaggtgcctacgagaagcctagtaatgctcaagatgtaatttggctggtcgctccgctgtttcccacagtagacctggcagatgaggctagacattccccaccagcgatggtggtctagcctgcgtggctgcctgcacaccctatgggtgtgaagccaaatttactgacagggtgtgaagagcctattgtgctcaccttgattcctccggcccctgaatgtggctaatcctaaccccgctgctattgcacacgaaccagtgtgtggatagtcgtaatgagcaatagtgggatggaaccaactactttgggtgtccgtgtttcttgtttttctttaatttgtcttatggtcacaatatatatataacatatattgtgatc

SEQ ID NO: 322 - DNA, 613 bp, Human rhinovirus A12
  source 1..613: mol_type = genomic DNA; note = Accession: EF173415
ttcaaactgggttgtggttgatcccaccacaactgctcactgagcgtagtgctctcatattccggtatgcttgcacgccagttttactcccctcccctcattgtaacttagaagcaaagcacacctgatcaataggagataacttgccaggttatctaagatcaagcacttctgtttccccggcaagtgtgaatatgctttacccaaggcaaaagctgatcttgtcgttatccgcaaggtgcctacgagaagcctagtaatgctcaagatgtggtttgactggtcgctccgctgttccccacagtagacctggcagatgaggctggacattccccaccagcgatggtggtccagcctgcgtggctgcctgcacaccctatgggtgtgaagccaaatttactgacagggtgtgaagagcctattgtgctcaccttgattcctccggcccctgaatgtggctaatcctaaccccgctgctattgcacacgaaccagtgtgtagatagtcgtaatgagcaatagtgggatggaaccaactactttgggtgtccgtgtttcttgtttttctttatttgtcttatggtcacaatatatatataacgtatattgtgatc

SEQ ID NO: 323 - DNA, 615 bp, Human rhinovirus A13
  source 1..615: mol_type = genomic DNA; strain = ATCC VR-1123
ttaaaactgggttcgggttgttcccacccaaaccacccacgtggtgtagtacactgttatcccggtaactttgtacgccagttttatctccccacccccttttgtaacttagaagttatgcacaatgaccaatagtgggcaatcatccagattgtcatcggtcgagcactcctgtttccccggttcaagttgatatgctctaacagggcaaaaacaatttgaatcgttacccgcaaggtgcctacacagaacttagtaccattctggaaaattcttggctggtcgctcagttactaccccagtaatagacctggcagatggggctagaagttccccactggcgacagtgttctagcctgcgtggctgcctgcacacccttcttgggtgtgaagcctagaattggacagggtgtgaagagtcgcgtgtgctcatcttgagtcctccggcccctgaatgcggctaaccctaaccctgcagccattgcccacaacccagtgggtctatggtcgtaatgagcaattgcgggatgggaccgactactttgggtgtccgtgtttcactttttacttattatttgcttatggtgacaatatatagatacatatattgacacc

SEQ ID NO: 324 - DNA, 616 bp, Human rhinovirus A13
  source 1..616: isolate = F03; mol_type = genomic DNA
ttaaaactgggtctgggttgttcccacccaaaccacccacgcggtgtagtacactgttattccggtaactttgtacgccagttttatatccccaccccccttttgtaacttagaagttatgcacactgaccaatagtgggcaatcatccagattgtcatcggtcgagcacttctgtttccccggtttgagttgatatgctccaccagggcaaaaacaactcagatcgttatccgcaagatgcctacacagaacttagtaccattctggaaaattcttggctggtcgttcaattactaccccagtaatagacctggcagatgaggctagaagttccccactggcgacagtgttctagcctgcgtggctgcctgcacacccttctggggtgtgaagcctagaattggacagggtgtgaagagtcgcgtgtgctcatcttgagtcctccggcccctgaatgcggctaaccctaaccctgcagccattgcccacaatccagtgggtttatggtcgtaatgagcaattgcgggatgggaccgactactttgggtgtccgtgtttcactttttacttattatttgcttatggtgacaatatatagatacatatattgacacc

SEQ ID NO: 325 - DNA, 525 bp, Human rhinovirus A15
  source 1..525: isolate = 7002; mol_type = genomic DNA
gttacatttggggtaacttagaagcatgtacacaacgatcaataggacgatggctatccaagtcatctaagatcaagcacttctgtctccccggtgagtgtgaatatgctttacccaaggcaaaagctaatctcatcgttatccgcaaggtgcctacgggaagcctagtaatattctgaagatattttggttggtcgctcagttgcactcacccatgcaatagacctggcagatggggctaggcgtacctcactggtaacagtggcctagcccgcgtggctgcctgcacaccttcgggtgtgaagccatgatattgacagggtgtgaagagcctactgtgctcaccttgagtcctccggcccctgaatgtggctaatcctaaccccgtatccattgcacacaaaccagtgtgtctatggtcgtaatgggtaactacgggatggaaccaactactttgggtgtccgtgtttcttgtttttctttaatactgcttatggtgacattatatatagatatagtgtcatc

SEQ ID NO: 326 - DNA, 615 bp, Human rhinovirus A15
  source 1..615: mol_type = genomic DNA; note = Accession: DQ473493
ttaaaactgggttcaggttgatcccacctgaacctcccaagcggagtagtactctgttatttcggtaactttgtacgccagttttatatccccctccccatgtaacttagaagatgagctcacagaccaatagccggcaatcatccagattgtcaatggtcaagcacttctgtttccccggtcaacgttgatatgctccaacagggcaaaaacaactgagatcgttatccgcaaagtgcctacgcaaagcctagtaatgctttcgaagtcatttggttggtcgctccgctgtaacccacagtagacctggcagatgaggctagaaactccccactggcgacagtgttctagcctgcgtggctgcctgcacaccctttgggtgtgaagccaaattacggacaaggtgtgaagagccccgtgtgctcactttgagtcctccggcccctgaatgtggctaaccttaaccctgcagctagagtgcacaatccagtgtatttctagtcgtaatgagcaattgcgggatgggaccaactactttgggtgtccgtgtttcactttctttttttatcttttatttgcttatggtgacaatatattgaattatatattgacacc

SEQ ID NO: 327 - DNA, 617 bp, Human rhinovirus A16
  source 1..617: isolate = KC939; mol_type = genomic DNA
ttaaaactggatctgggttgttcccactcagatcacctacatggtgttgtacactattatcacggtaattttgtacgccagttttatacccccttccccaaatgtaacttagaagcaaagcaaactgatcaacagggggcaatcgtccagattgtcaaagatcaagcacttctgtttccccggtcaaagttgatatgctccacaagggcaaaaacaactgagatcgttatccgcaagatgcctacgcaaagcctagtaatacattgaaagatacttggttggtcgctcagctgttaacccaacagtagacctggtggatgaggctagagattcccctccggcgacggagttctagcctgcgtggctgcctgcacacccattgggtgtgaagccaagtattggacaaggtgtgaagagccgcgtgtgctcatcttgagtcctccggcccctgaatgtggctaaccttaaacctgcagccagtgcacacaaaccagtgtgtagctggtcgtaatgagcaattgcgggatgggaccaactactttgggtgtccgtgtttcactttttccttttattattgcttatggtgacaatatatatagcatatatatattgttatc

SEQ ID NO: 328 - DNA, 625 bp, Human rhinovirus A16
  source 1..625: mol_type = genomic DNA; note = Locus: HRVPP
ttaaaactggatctgggttgttcccacccagatcacctacatggtgttgtacactattattacggtaatcttgtacgccagttttatactccctttcccaaatgtaacttagaagcaaagcaaactgatcaataggggacaatcatccagattgtcaaagatcaagcacttctgtttccccggtcaaagttgatatgctccacaagggcaaaaacaactgagatcgttatccgcaagatgcctacgcaaagcctagtaatacattgaaagatacttggttggtcgctcagctgttaacccaacagtagacctggtagatgaggctagagattcccctccggcgacggagttctagcctgcgtggctgcctgcacacccactgggtgtgaagccaagtattggacaaggtgtgaagagccgcgtgtgctcatcttgagtcctccggcccctgaatgtggctaaccttaaacctgcagccagtgcacacaatccagtgtgtagctggtcgtaatgagcaattgcgggatgggaccaactactttgggtgtccgtgtccgtgtttcactttttttccttttattattgcttatggtgacaatatatatagcatatatatattgttatc

SEQ ID NO: 329 - DNA, 609 bp, Human rhinovirus A18
  source 1..609: mol_type = genomic DNA; strain = HRVA18/03/ZJ/CHN/2017
actgaatccaggttgttcccacctggatttcccacgtggagtagtacactgttattccggtaactttgtacgccagttttatatcccctccccttttgtaacttagaagataagcacaaggaccaataggtggtggctatcccagtcactaaaggtcaagcacttctgtttccccggtcaatgttgatatgctccaccagggcaaaaacaacagagatcgttatccgcaaagtgcctacgcaaagcctagtagcactttgaatggtatgtggttggtcgttccgctatttcccatagtagacctggcagatgaggctagaaattccccactggcgacagtgttctagcctgcgtggctgcctgcgtgtcctaacggacacgaagccatatacttgacaaggtgtgaagagccccgtgtgctcactttgagtcctccggcccctgaatgtggctaaccttaaccctgcagctaaggcacacaacccagtgtgaacttagtcgtaatgagcaattgcgggacgggaccaactactttgggtgtccgtgtttcactttttaccttttataatgcttatggtgacaatatataataatttgtatattggcacc

SEQ ID NO: 330 - DNA, 611 bp, Human rhinovirus 18
  source 1..611: mol_type = genomic DNA; strain = ATCC VR-1128
ttaaaactgaatccaggttgttcccacctggatttcccatgtggagtagtacactgttattccggtaactttgtacgccagttttataaccccttccccttatgtaacttagaagataagcacaaagaccaataggtggtggctatcccagtcactaaaggtcaagcacttctgtttccccggtcaacgttgatatgctccaccagggcaaaaacaaccgagatcgttatccgcaaagtgcctacgcaaagcctagtagcactttgaatagcatgtggttggtcgctccactattccccatagtagacctggcagatgaggctagaaatcccccactggcgacagtgttctagcctgcgtggctgcctgcgtgtcctaacggacacgaagccatatgtttgacaaggtgtgaagagccccgtgtgctcactttgagtcctccggcccccgaatgtggctaaccttaaccctgcagctggggcatacaatccagtgtgaactcagtcgtaatgagcaattgcgggatgggaccaactactttgggtgtccgtgtttcacttttttttataatgcttatggtgacaatatataataatttgtatattggcacc

SEQ ID NO: 331 - DNA, 614 bp, Human rhinovirus 19
  source 1..614: mol_type = genomic DNA; strain = ATCC VR-1129
ttaaaactggatctgggttgttcccacccagatcatccacgtgatgttgtgctctattattccggtaattttgcacgccagtttttcatcccttccccctttgtaacttagaagacttaaacaaatgaccaataggaagcaacaaaccagttgcgataggtcaagcacttctgtttccccggtcaatgttgatatgctccaacggggcaaaaacagcagcgatcgttatccgcaaggtgcctacgcaaagcctagtagcgctcttgaaattgtttggttggtcgctcaagtacaaacccagtactagacctggcagatgaggctagaaaacccccactggcgacagtgttctagcctgcgtggctgcctgcacacccatttgggtgtgaagccaaacaacggacagggtgtgaagagccacgtgtgctcatcttgattcctccggcccctgaatgcggctaaccttaaacctgcagccattgctcacaatccagtgagttggtggtcgtaatgagcaattgcgggatgggaccgactactttgggtgtccgtgtttcactttttaccttgttttatgcttatggtgacaatatatagtagtatatattgacacc

SEQ ID NO: 332 - DNA, 591 bp, Human rhinovirus A20
  source 1..591: mol_type = genomic DNA; strain = RvA20/USA/2021/B4Q4QT
gatctcctacatggagttgtactctattattccggtaattttgtacgccagttttatctcccctatcccctttatgtaacttagaagttttgtacacaccgaccaataggtggtatttaaccaaaataccaaaggtcaagcacttctgttaccccggtcaagattgatatgctccaccagggcaaaaacagtcgcgatcgttacccgcaaggcaactacgcaaagcctagtatcatttttgatggtgtatggttggtcgttccgctatgaacctgatagtagacctggcagatgaggctagaaaatccccactggtaacagtgttctagcctgcgtggctgcctgcgtaccccctgtgggtacgaagccgtacatttgacaaggtgtgaagagccccgtgtgcttgctttgagtcctccggcccctgaatgtggctaaccttaaccctgcagctagtgtgcacaagccagtgcatagctagtcgtaatgagcaattgcgggatgggaccaactactttgggtgtccgtgtttcttgtttttcttttatgtttgcttatggtgacaatatatttaatacatatattgacacc

SEQ ID NO: 333 - DNA, 611 bp, Human rhinovirus A22
  source 1..611: mol_type = genomic DNA; strain = RvA22/USA/2021/WBLGNP
ataaaactggcgtgcaaagttcccatccagatcacccaagcggtgtagtgctctgttattccggtaactttgcacgccagttttattacccctttccccagtaacttagaagttttaatacactgaccaatagggtgcgacaaccagtcgtacaaggtcaagcacttctgtttccccggtcaatgttgatatgctcctccagggcaaaaacaacagcgatcgttatccgcaagatgcctacgcaaagcctagtagcatctttgaaaatacttggttggtcgctcatgtgcaaccccagcattagacctggcagatgaggctagaaattccccactggcgacagtgttctagcctgcgtggctgcctgcacaccctaacgggtgtgaagcctggtattggacaaggtgtgaagagccccgtgtgctcatcttgagtcctccggcccctgaatgcggctaaccttaaacctgcagccattgctcacaatccagtgagtctatggtcgtaatgagcaattgcgggatgggaccgactactttgggtgtccgtgtttctctttttacttaaatttgagcttatggtgacaatatatagcaatatatattggcatc

SEQ ID NO: 334 - DNA, 523 bp, Human Rhinovirus A23
  source 1..523: mol_type = genomic DNA; strain = RvA23/USA/2021/JZHYZ6
ccccctcccccatgtaacttagaagttttgcacagagaccaataggcagtaatcatccagattacttacggtcaagtacttctgtttccccggtcaaagttgatatgctccaccagggcaaaaacagctgcgatcgttatccgcaaagcgcctacgcaaagcttagtagcactctggaagttgtctggctggtcgctccaccattccccctggtagacctggcagatgaggctagaaactccccactggcgacagtgttctagcctgcgtggctgcctgcacaccctctgggtgtgaagccatacaatggacagggtgtgaagagccccgtgtgctcgctttgagtcctccggcccctgaatgtggctaaccttaaccctgcagctagagcgcacaacccagtgtgtttctagtcgtaacgagcaattgcgggatgggaccaactactttgggtgtccgtgtttccttgttttctttaaatgtttgcttatggtgacaatatatacgtatatatattgacacc

SEQ ID NO: 335 - DNA, 620 bp, Human rhinovirus A24
  source 1..620: mol_type = genomic DNA; strain = RvA24/USA/2021/QZ8RX3
ttaaaactggatctaggttgttaccacctagatctcctatgtggagttgtactctattattccggtaattttgtacgccagttttattctcccctccccccgacgtaacttagaagttgaacataccgaccaataggtaacatttatccagaatgttaaaggtcaagcacttctgtttccccggtcaaagttgatatgctccaacagggcaaaaacaaccgcgatcgttatccgcaaagcaactacgcaaagcctagtatcatttttgagagtatgtggttggtcgctccactataaacccaatagtagacctggcagatgaggctagaagttccccactggtaacagtgttctagcctgcgtggctgcctgcgtgctccttgtgagcacgaagccatatatttgacaaggtgtgaagagccccgtgtgcttgttttgaatcctccggcccctgaatgtggctaaccttaaccctgcagctagcgtgtacagtccagtgcaaagctagtcgtaatgagcaattgcgggacgggaccaactactttgggtgtccgtgtttcttgtttttcttttgtatttgcttatggtgacaatatatatacagcatatatattggcatc

SEQ ID NO: 336 - DNA, 588 bp, Human Rhinovirus A25
  source 1..588: mol_type = genomic DNA; strain = RvA25/USA/2021/A8F6KW
ggtgtagtactctggtattatgtacctttgtacgcctgttcttcccattgtaccctccctaaatttccaacccaagtaacgttagaagtttcacataaaagtacaacaggaagcaccacatccagtggtgttttgtacaagcacttctgtttccccggagcgaggtataggctgtacccaatgccaaaagcctttaaccgttatccgccaaccaactacgtaaaagctagtaacatcttgtttgtaacttggcgttcgatcaggtggattccccctccactagtttggtcgatgaggctaggagttccccacgggtgaccgtgtcctagcctgcgtggcggccaacccagcacttgctgggacgcccttttatagacatggtgtgaagactcgcatgtgcttggttgtgattcctccggcccctgaatgcggctaaccttaaccccggagccttgtgttgcaaaccagcaacattaaggtcgtaacgagcaattctgggatgggaccgactactttgggtgtccgtgtttccaatttttcttattattgtcttatggtcacagcatatttgataaatatactgtgatc

SEQ ID NO: 337 - DNA, 614 bp, Human Rhinovirus A28
  source 1..614: mol_type = genomic DNA; strain = RvA28/USA/2021/ADMJHA
ttaaaactgaatctaggttgttcccacctagattacccacgtggtgtagtactctattattacggtaattttgtacgccagttttatgctcccccccccacttgtaacttagaagttttaaactcaaagaccaataggcggtgattatccaaatcatcaacggtcaagcacttctgtttccccggttagattgatacgctccaacagggcgaaaacaactctaatcgttatccgcaagatgcctacgcaaagcctagtatcatcttcgattctatttggttggtcgctcggctacaaacccagtagtagacctggcagatgaggctggaaataccccactggcgacagtgttctagcctgcgtggctgcctgcacaccctatgggtgtgaagccaagtagttgacaaggtgtgaagagccccgtgtgctcatcttgattcctccggcccctgaatgtggctaaccttaaacctgcagccaatatacacaatccagtgtattgttggtcgtaatgagtaattgcgggatgggaccaactactttgggtgtccgtgtttctctttttacctttattattgcttatggtgacagtatatagtatatatattgtcact

SEQ ID NO: 338 - DNA, 597 bp, Human Rhinovirus A29
  source 1..597: mol_type = genomic DNA; strain = RvA29/USA/2021/273658-4
gttgttcccacctggatctcctacatggagttgtactctattattccggtaatcttgtacgccagttttatatcccttccccttttgtaacttagaagttaaacacacagaccaataggtgatggctatccaagtcattaacggtcaagcacttctgtctccccggttcgaattgatacgctccaccagggcgaaaacaattcgtatcgttatccgcaaagtgactacgcaaagcctagtaataccttgaagaacttatggttggtcgctccactaaaccccatagtagacctggcagatgaggctagaagtaccccactggtaacagtgttctagcctgcgtggctgcctgcacaccctctgggtgtgaagccatatttttgacaaggtgtgaagagccccgtgtgctcactttgagtcctccggcccctgaatgtggctaaccttaaccctgcagctagtgcatgcaatccagcatgttgctagtcgtaacgagcaattgcgggatgggaccaactactttgggtgtccgtgtttcactttttaccttttatttgcttatggtgacaatatatataatacatatatattggcatc

SEQ ID NO: 339 - DNA, 601 bp, Human rhinovirus A30
  source 1..601: mol_type = genomic DNA; strain = MCL-18-H-1135
gatctaggttgtccccacctagatctcccacagggagtggtactctgttattacggtaactttgtatgccagttttatctcccctaccccttatgcaacttagaagttttacacaaagaccaataggcagtaaccatccaggttacttaaggtcaagcacttctgtttccccggttgacgttgatatgctccaacagggcaaaaacaacagaaatcgttacccgcaaagtgcctacgcaaagcctagtaacactttagaagttgtctggttggtcgctccgccatttcccctggtagacctggcagatgaggctagaaataccccactggcgacagtgttctagcctgcgtggctgcctgcacaccctatgggtgtgaagccatacaatggacaaggtgtgaagagccccgtgtgctcactttgagtcctccggcccctgaatgtggctaaccttaaccctgcagctagggcacataatccagtgtgtatctagtcgtaatgagcaattgcgggacgggaccaactactttgggtgtccgtgtttctctttttatccttatatttgcttatggtgacaatatatgaatatatattgacacc

SEQ ID NO: 340 - DNA, 598 bp, Human rhinovirus A31
  source 1..598: mol_type = genomic DNA; strain = RvA31/USA/2021/273760-4
gtgtactactccacgtgggaagtacgggtggagtagtacactattattacggtaatcttgtacgccagttttataaccccttcccttttgtaacttagaagtttgaacttaagaccaataggtggtaatcaaccagattactaaaggtcaagcacttctgtttccccggtcaatattgatatgctccaccagggcaaaaacaattgcgatcgttatccgcaaagtgcctacgcaaagcttagtaacactttgaacaatatatggttggtcgttccgctattccccatagtagacctggcagatgaggctggaaactccccactggcgacagtgttccagcctgcgtggctgcctgcgcactctcacgagtgcgaagccatatatttgacaaggtgtgaagagccccgtgtgctcactttgagtcctccggcccctgaatgtggctaaccttaaccctgcagctagtgcatacaagccagtatgtagctagtcgtaatgagcaattgcgggatgggaccaactactttgggtgtccgtgtttcacttttatctttattatttgcttatggtgacagtatatagtgtatatattgttacc

SEQ ID NO: 341 - DNA, 610 bp, Human rhinovirus A32
  source 1..610: mol_type = genomic DNA; strain = ATCC VR-1142
ttaaaactggatccgggttgttcccacccggatctcccacgtggagttgtacactattattacggtaattttgtacgccagttttatatcccttaccccaagtaacttagaagataaacacacagaccaataggaggtggtcatccagatcactaagggtcaagcacttctgtttccccggtcaaggttgatatgctccaacagggcaaaaacagctgagatcattatccgcaaagtgcctacgcaaagcctagtaactacctcgaaagtacttgactggtcgctccgccataccccatggtagacctggcagatgaggctagaaatcccccactggtgacagtgttctagcctgcgtggctgcctgcacaccctttgggtgtgaagccaagtaatggacagggtgtgaagagtcgagtgtgctcactttgagtcctccggcccctgaatgtggctaaccctaaccctgcagctagggcacacaatccagtgtgtatctagtcgtaatgagcaattgcgggatgggaccaactactttgggtgtccgtgtttcttgtttttcatttataattgcttatggtgacaatatatagtattatatattggcgtc

SEQ ID NO: 342 - DNA, 619 bp, Human rhinovirus A33
  source 1..619: mol_type = genomic DNA; strain = ATCC VR-330
ttaaaactggatctaggttgttcccacctagatctcctacacggagttgtactctgttattccggtaactttgtacgccagttttatacccccttccccctttgtaacttagaagctgaacatactgaccaataggcggcattcaaccagaatgtcaaaggtcaagcacttctgtttccccggttaaagctgatatgctccaacagggcaaaaacagccttaatcgttatccgcaagacaactacgcaaagcctagtatcatctttgaaagtatgtggttggtcgctccgctataaactcaatagcagacctggcagatgaggctagaaactccccactggcgacagtgttctagcctgcgcggctgcctgcgtgccctatacgggtacgaagccatatatttgacaaggtgtgaagagccccgtgtgcttgtcttgagtcctccggcccctgaatgtggctaaccttaaccctgcagctggtatgcacaatccagtacatggccagtcgtaatgagcaattgcgggatgggaccaactactttgggtgtccgtgtttcctattttacctttatatttgcttatggtgacaatatatatataacatatatattggcatc

SEQ ID NO: 343 - DNA, 611 bp, Human rhinovirus A34
  source 1..611: mol_type = genomic DNA; strain = ATCC VR-1144
ttaaaactgggtccaggttgttcccacctggacttcccacgtggagttgtgcactgttattccggtaactttacacgccagttttatctcccttcccaaaygtaacttagaagatgtacacagcgaccaataggtggcaactagccaagttgcttaaggtcaagcacttctgtctccccggtcaatgttgatacgctctcccagggcgaaaacaactgagatcgttatccgcaaggcgcctacacaaaacctagtaacatcttgaatggtatgtggctggtcgttccgctaaaccccatagtagacctggcagatgaggctagaaattccccactggcgacagtgttctagcctgcgtggctgcctgcgtgtccttacggacacgaagccatatacttgacaaggtgtgaagagtcccgtgtgctcgtcttgagtcctccggcccctgaatgtggctaaccttaaccctgcagccagtgcgcacaaaccagtgtgtagctggtcgtaatgagtaattgcgggatgggaccaactactttgggtgtccgtgtttcactttttaccttttattatgcttatggtgacaatatatagatgcatatattgacacc

SEQ ID NO: 344 - DNA, 616 bp, Human rhinovirus A36
  source 1..616: mol_type = genomic DNA; note = Accession: DQ473505.1
ttaaaactgggagtgggttgttcccactcactccacccatgcggtgttgtacactgttattacggtaaccttgtacgccagttttgccacccttccccattatgtaacttagaagtttgtacaacaagaccaataggtgataattatccagattatcaaaggtcaagcacttctgtttccccggtcgatgaggatatgctttacccaaggcaaaaaccttaaagatcgttatccccacactgcctacacagagcctagtaccacttttgatgtaattaggttggtcgctccctgcaaacccagcagtagacctggcagatgaggctggacactccccactggtgacagtggtccagcctgcgtggctgcctgctcaccctattgggtgagaagcctacttattgacaagatgtgaagagccgcgtgtgctcagtgtgcttcctccggcccctgaatgtggctaaccttaaccctgcagccgctgcccataatccaatgggtttacggtcgcaacgcgcaagtgcgggatgggaccaactactttgggtgtccgtgtttcctatttttcttttatttgcattttatggtgacaatttatagtatatagattgtcgtc

SEQ ID NO: 345 - DNA, 610 bp, Human rhinovirus A38
  source 1..610: mol_type = genomic DNA; strain = ATCC VR-1148
ttaaaactggatctgggttgttcccactcagatctcccatgcggagttgtactctattattccggtaatcttgtacgccagtttttacaccctccccccttgtaacttagaagaaagtacataacgaccaataggtggcaattaaccaaattgtcaacggtcaagcacttctgtttccccggtcaagattgatacgctccaacagggcgaaaacaattgagatcgttatccgcaaagtgcccacgcaaagcctagtaacactttgaaaggtctatggttggtcgttcagctaaaccccatagtagacctggcagatgaggctagaaattccccactggcgacagtgttctagcctgcgtggctgcctgcacaccctcacgggtgtgaagccatatactcgacaaggtgtgaagagccccgtgtgctcactttgagtcctccggcccctgaatgtggctaaccttaaccccgcagctagtgcatacaaaccagtatgtggctagtcgtaatgagcaattgtgggatgggaccaactactttgggtgtccgtgtttcacttttttccttttgtttgcttatggtgacaatatatatagtatatattgacacc

SEQ ID NO: 346 - DNA, 613 bp, Human rhinovirus A39
  source 1..613: mol_type = genomic DNA; strain = ATCC VR-340
ttaaaactggatctgggttgttcccacctagatcacctacagggtgtagtacactgttattacggtaactttgtacgccagttttatatcccctccccgatgtaacttagaagcaagcacaaacgtccaataggcggtgattatccaaatcacttacggacaagcacttctgtctccccggcaactgctgatatgctccaacagggcaaaaacagcggaagtcgtcatccgcaaaatgcctacgcaaagcctagtatcactctagaaggtgtgtggttggtcgctcagccgtgaacctgacggtagacctggcagatgaggctagaaataccccactggcgacagtgttctagcctgcgtggctgcctgcacaccctcacgggtgtgaagccattcattggacagggtgagaagagcccagtgtgctcattttgagtcctccggcccctgaatgtggctaaccttaaacctgcagccaatgcacacaacccagtgtgtatttggtcgtaacgagcaattgcgggatgggaccaactactttgggtgtccgtgtttctttttattcttatcatattgcctatggtgacaatatatactgttatatattgttatc

SEQ ID NO: 347 - DNA, 612 bp, Human rhinovirus A40
  source 1..612: mol_type = genomic DNA; strain = 7D5
ttaaaactgggtccaggttgttcccacctggatctcctacatggagttgtactctgttattccggtaaccttgtacgccagttttatatcccctccccaaatgtaacttagaagttatacacacagaccaataggcggtgatcctccagatcactaacggtcaagcacttctgtctccccggtttgaattgatacgctccaacagggcgaaaacaatttgaatcgttacccgcaaagtgcctacgcaaagcctagtagcactttagaaaatttatggttggtcgctcagctataccccctagtagacctggcagatgaggctagaagtaccccactggcgacagtgttctagcctgcgtggctgcctgcacaccctcacgggtgtgaagccatatatttgacaaggtgtgaagagccccgtgtgctcactttgagtcctccggcccctgaatgtggctaaccttaaccctgcagctagtgcatgtaatccaacatgttgctagtcgtaatgagcaattgcgggatgggaccaactactttgggtgtccgtgtttcactttttaccttttatttgcttatggtgacaatatatataatatatatattggcatc

SEQ ID NO: 348 - DNA, 613 bp, Human rhinovirus A41
  source 1..613: mol_type = genomic DNA; strain = SC9861
taaaactgggtttgggttgatcccacccaaaccacccatgtggtgtagtacactgttatttcggtaactttgtacgccagttttatctccccttcccccttcgtaacttagaagtaacacataatgaccaatagcgggcaatcatccagattgtcactggtcaagcacttctgtttccccggttcagattgatatgctccaacagggcaaaaacagtttgaatcgttacccgcaagatgcctacgcagaacctagtatcacactgaaagattcttggttggtcgttcagttacatccccagtaacagacctggcagatgaggctagaagttccccactggcgacagtgttctagcctgcgtggctgcctgcacacccatttgggtgtgaagcctagaattggacagggtgtgaagagtcgagtgtgctcatcttgagtcctccggcccctgaatgcggctaaccttaaccccgcagccattgcccacaaaccagtgggtttatggtcgtaatgagcaattgtgggatgggaccgactactttgggtgtccgtgtttcactttttacttattatttgcttatggtgacaatatatagatacatatattgacacc

SEQ ID NO: 349 - DNA, 613 bp, Human rhinovirus A43
  source 1..613: mol_type = genomic DNA; strain = ATCC VR-1153
ttaaaactgggtccaggttgctcccacctggatcactcactgagtgttgtatactgttattacggtaactttatacgccagttttatctccccttaccccaatgtaacttagaagtttgtacataccgaccaatagtgagcaatcatccagattgtttaaggtcaagcacttctgttaccccggtcagcgttgatatgctccaacagggcaaaaacaacaatgatcgttatccacaagatgcctacacagagcctagtaacattctagaaaaattctggttggtcgctcaattgcaaacccagcaatagacctggcagatgaggctggacattccccactggcgacagtggtccagcctgcgtggctgcctgcacactcctttggagtgtgaagccataatttggacagggtgcgaagagccgcgtgtgctcatcttgagtcctccggcccctgaatgcggctaaccttaaacctgcagccattgtttgcaatccagcagatrtatggtcgtaatgagcaattgcgggatgggaccgactactttgggtgtccgtgtttcctttatttccatttatatgcttatggtgacaatatatgatatatattgacacc

SEQ ID NO: 350 - DNA, 612 bp, Human rhinovirus A44
  source 1..612: mol_type = genomic DNA; note = Accession: DQ473499
ttaaaactgggtccaggttgttcccacctggatctcctacatggagttgtactctattatcccggtaatcttgtacgccagttttatatcccttccctttttgtaacttagaagttaaacacacagaccaataggtggtggctatccaagtcattaatggtcaagcacttctgtttccccggtttagattgatacgctccaccagggcgaaaacaatttaaatcgttatccgcaaaatgactacgcaaagcctagtaatatcttgaaggacttatggttggtcgctccactaaaccccatagtagacctggcagatgaggctagaaataccccactggagacagtgttctagcctgcgtggctgcctgcacaccctatgggtgtgaagccatactttcgacaaggtgtgaagagccccgtgtgctcattttgagtcctccggcccctgaatgtggctaaccttaaccctgcagctagtgcatgcaatccagcatgttgctagtcgtaacgagcaattgcgggatgggaccaactactttgggtgtccgtgtttcactttttccttttatttgcttatggtgacaatatatatagtacatatatattggcatc

SEQ ID NO: 351 - DNA, 615 bp, Human rhinovirus A45
  source 1..615: mol_type = genomic DNA; strain = ATCC VR-1155
ttaaaactgggtcgtggttgttcccaccacgactatctacggatgtagtgctcttgtattccggtacgcttgcacgccagttttgtcacccccccctacattgtaacttagaagattaacacaaagaccaataggcggcaatgaaccacattgtcaacggtcaagcacttctgtttccccggtcaatctagatatgctttaccaaaggcaaaaactggagcgatcgttatccgcaaggtgcctacgggaaacccagtagcattctttatttgatctggttggttgctcagccgttaaacccaaacggtaaacctggcagatgaggctggaagatccccaccagcgatggtgttccagcctgcgtggctgcctgcacacccgaaagggtgtgaagccttttcaaagacagggtgcgaagagtctactgtgctcaccttgattcctccggcccctgaatgtggctaatcctaaccccgtagctgtggtgtgcaatccagcacattcgcagtcgtaatgggtaactgcgggatggaaccaactactttgggtgtccgtgtttctctttttccttttatatatgcttatggtgacaattatacggatatagttgtcatc

SEQ ID NO: 352 - DNA, 609 bp, Human rhinovirus A46
  source 1..609: mol_type = genomic DNA; strain = RvA46/USA/2021/6EEDHN
ttaaaactgaatctgggttgttcccacccagatttcccatgtggagtagtactctattattccggtaattttgtacgccagttttataacccctaccctaagcaacttagaagataagcacactcgaccaatagtgggtgattatccaaatcatcaaaggtcaagcacttctgtttccccggttgaagttgatatgccccaccagggcaaaaacaactgagatcgttatccgcaaaatgcctacacaaagcctagtatcatcttgaaaggcgcagagttggtcgttccgctattccccatagtagacctggcagatgaggctagaaaacccccactggcgacagtgttctagcctgcgtggctgcctgcgtgccttgcaaggcacgaagccctgtgtttgacaaggtgtgaagagccccgtgtgctcattttgattcctccggcccctgaatgtggctaaccttaaccctgcagctagtgcacacaaaccagtgtgtatctagtcgtaatgagcaattgcgggacgggaccaactactttgggtgtccgtgtttctctttttactttttacttgcttatggtgacaatatatagatatatattgacacc

SEQ ID NO: 353 - DNA, 612 bp, Human rhinovirus A47
  source 1..612: mol_type = genomic DNA; strain = ATCC VR-1157
ttaaaactgggtgtgggttgttcccacccacacctcccacgtggagtagtacactgttatcacggtaattttgtacgccagttttataacccctttcccttttgtaacttagaagtttgaacttgagaccmataggcggtggtcaaccagatcactaaaggtcaagcacttctgtttccccggtcaacgttgatatgctccagcagggcaaaaacagytgcgatcgttatccgcaaagtgcctacgcaaagcttagtaacatcttgaatgatatatggttggtcgttccactaaaccccatagtagacctggcagatgaggctggaaattccccactggcgacagtgttccagcctgcgtggctgcctgcgcactcttatgagtgcgaagccatatatttgacaaggtgtgaagagccccgtgtgctcactttgagtcctccggcccctgaatgtggctaaccttaaccctgcagctagtgcatacaatccagtgtgtagctagtcgtaatgagcaattgcgggatgggaccaactactttgggtgtccgtgtttcacttttccttttatgatttgcttatggtgacagtatatagtttatatattgttgcc

SEQ ID NO: 354 - DNA, 615 bp, Human rhinovirus A49
  source 1..615: isolate = F04; mol_type = genomic DNA
ttaaaactggatctgggttgttcccacttggatctcccaaagggagtggtactctgttattacggtaactttgtacgccagttttatcctccccttaccccatgtaacttagaagtttttcataaagaccaatagttggtaatcatccagattacttaaggtcaagcacttctgtttccccggtcaatgttgatatgctccaacagggcaaaaacaactgcgatcgttatccgcaaagcgcctacgcaaagcttagtagcacctttgagattgtttggttggtcgttccgccatttcccctggtagacctggcagatgaggctagaagtaccccactggcgacagtgttctagcctgcgtggctgcctgcacaccctgtgggtgtgaagccaaataatggacaaggtgtgaagagccccgtgtgctcgctttgagtcctccggcccctgaatgcggctaaccttaaccctgcagctagagcatacaaaccagtgtgtatctagtcgtaatgagcaattgcgggatgggaccgactactttgggtgtccgtgtttcactttttttttacttataattgcttatggtgacaatatatatatagtatatattgacacc

SEQ ID NO: 355 - DNA, 610 bp, Human rhinovirus A50
  source 1..610: mol_type = genomic DNA; strain = ATCC VR-517
ttaaaactgggtccaggttgttcccacctggatctcctaatgggagttgtactctgttattccggtaactttgtatgccagttttatctccctacccccaatgtaacttagaagatgtacacaacgaccaataggtgatgatcaaccagattatcaaaggtcaagcacttctgttttcccggttagagttgatatgctccaacagggcaaaaacaactttaatcgttatccgcaaagcgcctacgcaaagcctagtaacagcttcgaagatttatggttggtcgttccgctgttccccacagtagacctggcagatgaggctagagattccccactggtaacagtgttctagcctgcgtggctgcctgcgcacccttcgggtgcgaagccatatttcggacaaggtgcgaagagccccgtgtgctcgctttgagtcctccggcccctgaatgtggctaaccttaaccctgcagctagtgcatacaaaccagtatgtggctagtcgtaatgagcaattgcgggatgggaccaactactttgggtgtccgtgtttctctttttccttttattattgcttatggtgacaatatatagtttatatattggcacc

SEQ ID NO: 356 - DNA, 613 bp, Human rhinovirus A51
  source 1..613: mol_type = genomic DNA; strain = ATCC VR-1161
ttaaaactgggtgtgggttgtacccacccacactgtctacggacgtagtgctctcatattacggtatgtttgcacgccagtttttaccccccccccaaatttgtaacattagaagtctgcactcttaacctggtcaataggaggtagcaatccatgctatctaagaccaagcacttctgttaccccggtatgcggagaatagactccaaaagggttgaagctccaaatatcgttatccgcacaattactacacaaagcctagtaatatcttgataagctctttggttggtcgttcagctgttacccccagtagacttggcagatgaggctgggtgttccccactggcgacagtgacccagcctgcgtggctgcctacacacctggagacaggtgtgaagccaaaagtggacaaggtgtgaagagccccgtgtgctaattgtgattcctccggcccctgaatgcggctaatccaaccccacagccaatgcatgtaaaccaacatgtatttggtcgtaacgggtaactgtgggacggaaccgactactttgggtgtccgtgtttccttttatttttrttgcttatggtgacaagtattggtatatatttgtcatc

SEQ ID NO: 357 - DNA, 612 bp, Human rhinovirus A53
  source 1..612: mol_type = genomic DNA; note = Accession: DQ473507
ttaaaactggatctgggttgctcccacccagattacccaagtggtgtagtactctgttattacggtagctttgtacgccagttttatcacccctccccacaatgtaacttagaagttttacacttacagaccaataggatgtgattatccaaatcactaaaggtcaagcacttctgtttccccggttagatttgatacgctccaacagggcgaaaacagatctgatcgttatccgcaagatgcctacgcaaagcttagtagcgctctgaatgctttttggctggttgttccactacaaacccagtagtaaacctggcagatgaggctagaagttccccactggcgacagtgttctagcctgcgtggctgcctgcacaccctatgggtgtgaagccaatcagttgacagggtgtgaagagccccgtgtgctcatcttgagtcctccggcccctgaatgtggctaaccttaaacccgcagccaaggtgtgcaaaccagcacattcttggtcgtaacgagtaattgtgggatgggaccaactactttgggtgtccgtgtttctttttattcttttacaatgcctatggtgacaatatatagtatatattgtcatt

SEQ ID NO: 358 - DNA, 611 bp, Human rhinovirus A54
  source 1..611: mol_type = genomic DNA; strain = ATCC VR-1164
ttaaaactgggtctaggttgttcccacctagacctcctacatggagttgtactctattatttcggtaattttgtacgccagttttatatcccctttccccacgtaacttagaagtttaacacactgaccaataggtggcaattaaccaaattgctaaaggtcaagcacttctgtttccccggtcaagattgatacgctctaccagggcgaaaacaattgagatcgttamccgcaaagtgcctacgcgaagcctagtaacatcttgaagaatttatggttggtcgctccactattccccatagtagacctggcagatgaggctagaaattccccactggcgacagtgttctagcctgcgtggctgcctgcacacccttacgggtgtgaagccatatatttgacaaggtgtgaagagcctagtgtgctcactttgagtcctccggcccctgaatgtggctaaccttaaacccgtagctagtgcatacaatccagtgtgtggctagtcgtaacgagcaattacgggatgggaccaactactttgggtgtccgtgtttcactttttccttttatatttgcttatggtgacaatatatagattatatattgacacc

SEQ ID NO: 359 - DNA, 522 bp, Human rhinovirus A55
  source 1..522: mol_type = genomic DNA; note = Accession: DQ473511
accttcctccatgtaacttagaagatgtacactcagaccaataggtgataatcctccagattatctaaggtcaagcacttctgtttccccggtctaaactgatatgctccaacagggcaaaaacagtgcagatcgttatccgcaggatgcctacgcaaagtctagtaacccctttgaagatatttggttggtcgctccactattccccatagtagacctggcagatgaggctagaaattccccactggtgacagtgttctagcctgcgtggctgcctgcacaccctattgggtgtgaagccaaatattggacaaggtgtgaagagccccgtgtgctcatcctgagtcctccggcccctgaatgtggctaaccttaaccctgcagctagtgcatgcaatccagcatgtagctagtcgtaatgagcaattgcgggatgggaccaactactttgggtgtccgtgtttcactttttaccttatatttgcttatggtgacaatatatattgcatatatattggcatc

SEQ ID NO: 360 - DNA, 613 bp, Human rhinovirus A56
  source 1..613: mol_type = genomic DNA; strain = ATCC VR-1166
ttaaaactgrgttcaggttgttcccacctggacttcctatgtggagttgtacactgttatcccggtaaccttgtacgccagttttatacacccttccctgtaacttagaagttataagcacgaggaccaataggtagtgactttccaggtcactaaaggtcaagcacttctgtctccccggtcaaagttgatatgctctccccagggcaaaaacaattgagatcgttatccgcaatgtgcctacgcaaagcctagtaatatcttagatgatatatggttggtcgctccgccatttcccatggtagacctggcagatgaggctagaaactccccactggcgacagtgttctagcctgcgtggctgcctgcgcactctctgagtgcgaagccatatatttgacaaggtgtgaaragccccgtgtgctcacattgaatcctccggcccctgaatgtggctaaccttaaacctgcagctagtgcacacaaaccagtgtgtagctagtcgtaacgagcaattgcgggatgggaccaactactttgggtgtccgtgtttcacttttttccttttatatttgcttatggtgacaatatatataatacatatattgacacc

SEQ ID NO: 361 - DNA, 614 bp, Human rhinovirus A57
  source 1..614: isolate = fs ship#1-hrv-57; mol_type = genomic DNA
ttaaaactggatccaggttgttcccacctggatctcctacgggagttgtactctgttatttcggtaaccttgtacgccagttttatctcccctcccccaattgtaacttagaagcaatacacaaggaccaataggcagtgattaaccagatcacttaaggtcaagcacttctgtttccccggtctgagttgatatgctctaacagggcaaaaacaagtcagatcgttatccgcaaagtgcctacgcaaagcctagtatcatctttgaaaatgtatggttggtcattccgctgaaccccacagtagacctggcagatgaggctagaaaccccccactggcgacagtgttctagcctgcgtggctgcctgcacacccttatgggtgtgaagccatatatttgacaaggtgtgaagagccccgtgtgctcactttgagtcctccggcccctgaatgtggctaaccctaaccctgcagctagtgcatacaagccagtatgttgctagtcgtaacgagcaattgcgggatgggaccaactactttgggtgtccgtgtttcactttttacctttatactgcttatggtgacaatatatatatagcatatatattgacacc

SEQ ID NO: 362 - DNA, 618 bp, Human rhinovirus A58
  source 1..618: mol_type = genomic DNA; strain = ATCC VR-1168
ttaaaactgggagtaggttgttcccacctactctacccacgtggtgttgtacactgttatcacggtaactttgtatgccagttttgccacccttccccgtagcgtaacttagaagtttgtacacttagaccaataggcgataatcatccagattatcaaaggtcaagcacttctgtttccccggtcaatgaggatatgcttttcccaaggcaaaaaccttagagatcgttatccccacattgcctacacagagcctagtatcacctttgatgtatttagactggtcgctccctgcaaacccagcagtagacctggcagatgaggctggacgttccccactggcgacagtggtccagcctgcgtggctgcctgcccacccatttgggtgggaagcctaactattgacatggtgtgaagagccgcgtgtgctcaatgtgcctcctccggcccctgaatgtggctaaccttaaccccgcagccgctgcccatgatccagtgggtatacggtcgtaacgcgcaagtgtgggatgggaccaactactttgggtgtccgtgtttcctgtttttcttttttttatgcattttatggtgacaatttatggtatatagattgtcatc

SEQ ID NO: 363 - DNA, 614 bp, Human rhinovirus A59
  source 1..614: mol_type = genomic DNA; strain = 16-J2
ttaaaactggatccaggttgttcccacctggatctcccaagtggagtggtacactattatcccggtaattttgtacgccagttttataacccctcccccccttgtaacttagaagatgtaaacacagaccaataggtggtaactaaccaagttactaaaggtcaagcacttctgtttccccggctgatattgatatgctccaccagggcaaaaacaatagaagtcgttatccgcaaagtgcctacgcaaagcctagtagcactttagattgtgtatggttggtcgctcagctattccccctagtagacctggcagatgaggctagaaataccccactggtaacagtgttctagcctgcgtggctgcctgcgcaccctttcgggtgcgaagccatatacatgacaaggtgtgaagagccccgtgtgctcactttgagtcctccggctcctgaatgtggctaaccttaaacctgcagccagtgcacataagccaatgtgtagctggtcgtaatgagtaattgcgggatgggaccaactactttggatgtccgtgtttcttgtttttcctttaattttgcttatggtgacaatatatagataatatatattggcatc

SEQ ID NO: 364 - DNA, 613 bp, Human rhinovirus A60
  source 1..613: mol_type = genomic DNA; strain = ATCC VR-1473
ttaaaactggatccaggttgttcccacctggatctcctaacgggagtagtacactattattacggtaattttgtacgccagttttatgatcccctcccccttttgtaacttagaagttaaacaaaatgaccaataggcggcaatctcccagattgtcaaaggtcaagcacttctgtttccccggtcaaagctgatatgctccaacagggcaaaaacagctgagatcgttacccgcaaagtgcctacgcaaagcttagtaacacttttgaagttacgtggttggtcgctcagccaaaccccatggtagacctggcagatgaggctagaagtaccccactggcgacagtgttctagcctgcgtggctgcctgcacaccctctgggtgtgaagccatataatggacaaggtgtgaagagccccgtgtgctcactttgagtcctccggcccctgaatgtggctaaccttaaccctgcagctagtgcatgcaatccagtatgtatctagtcgtaatgagcaattgcgggatgggaccaactactttgggtgtccgtgtttcctttttatccttattgattgcttatggtgacaatatatagtattatatattgacrcc

SEQ ID NO: 365 - DNA, 618 bp, Human rhinovirus A61
  source 1..618: mol_type = genomic DNA; strain = SCH-99
ttaaaactgggtctgggttgtccccacccagaccacccacgtggtgttgtacactgttatcccggtaactttgtacgccagttttaaactcccttaccccttttgcaacttagaagttatacacaccgaccaacagcagacaatcatccagattgtttatggtcaagcacttctgtctccccggtctcctctgatatgctccaacagggcaaaaacagagtagatcgttacccgcaagatgcctacgcaacgcctagtaacactttgaagtgattttggttggtcgctcatttacaaccccagtaatagacctggcagatgaggctagatgttccccactggcgacagtgatctagcctgcgtggctgcctgcacaccctttgtgggtgtgaagccaaatttatgacaaggtgcgaagagccacgtgtgctcatcttgagtcctccggcccctgaatgcggctaaccttaaccctgcagccattgctcacaaaccagtgagtatgtggtcgtaatgagaaattgcgggacgggaccgactactttgggtgtccgtgtttcactttttaccttatttttgcttatggtgacaatatatatatagatatatattgacacc

SEQ ID NO: 366 - DNA, 614 bp, Human rhinovirus A62
  source 1..614: mol_type = genomic DNA; strain = ATCC VR-1172
ttaaaactggatccaggttgttcccacctggatytcctacgtggagttgtactctattattccggtaatcttgtacgccagttttatattccctaccccttttgtaacttagaagttaagcacacagaccaataggcggtgaccacccaagtcactaacggtcaagcacttytgtttccccggttaagattgatacgctccaacagggcgaaaacaatytaaatcgttaaccgcaaagtgactacgcaaagcttagtaataccttgaagaatttatggctggtcgttccgctataacccctagtagacctggcagatgaggctagaaataccccactggtaacagtgttctagcctgcgtggctgcctgcacaccctttttgggtgtgaagccatatatttgacaaggtgtgaagagccccgtgtgctcactttgagtcctccggcccctgaatgtggctaaccttaaccctgcagctagtgtatgtaatccaacatatggctagtcgtaatgagcaattgcgggatgggaccaactactttgggtgtccgtgtttcactttttccttttattttgcttatggtgacaatatatataatatatatattggcatc

SEQ ID NO: 367 - DNA, 618 bp, Human rhinovirus A63
  source 1..618: mol_type = genomic DNA; strain = ATCC VR-1173
ttaaaactgggtccaggttgttcccacctggacctcctaagtggagtggtacactattattccggtaattttgtacgccagttttatctccccaccccccttttgtaatttagaagttatgaacacagaccaataggtggcaactagccaagttgttaaaggtcaagcacttctgtctccccggctgacgttgatatgctccaacagggcaaaaacaatgaaagtcgttatccgcaaagtgcctacgcaaagcctagtaacactttgaaatgtctatggttggtcgctcagctattccccatagtagacctggcagatgaggctagaaataccccactggtaacagtgttctagcctgcgtggctgcctgcgcaccctccccgggtgcgaagccatatatatgacaaggtgcgaagagccccgtgtgctcactttgaatcctccggctcctgaatgtggctaaccttaaccccgcagccagtgcacataagccaatgtgtggctggtcgtaatgagcaattgtgggatgggaccaactactttggatgtccgtgtttcctgtttttcttttattcttgcttatggtgacaatatatatagtttatatatattggcatc

SEQ ID NO: 368 - DNA, 614 bp, Human rhinovirus A64
  source 1..614: mol_type = genomic DNA; strain = ATCC VR-1174
ttaaaactggatctgggttgttcccacccagatcacccaagtggtgtagtactctgtcattccggtgactttgtacgccagtttttacaccccccccttcttgtaacttagaagaattaagttcagaccaataggaaaacgacaaaccagtcgtttaaggtcaagcacttctgtttccccggtcaatgctgatatgcttcaccaaggcaaaaacagcagcgatcgttacccgcaagacgcctacgcaaagcctagtaatgcctttgaagatatttgtctggtcactcaggtacaatcccagtactagacctggcagatgaggctggaaaatccccactggcgacagtgttccagcctgcgtggctgcctgcacacccatacgggtgtgaagccaaatattggacaaggtgtgaagagccccgtgtgctcgtcttgagtcctccggcccctgaatgcggctaaccttaaccccacagccattgcttgcattccagcaagtctatggtcgtaatgagcaattgtgggatgggaccgactactttgggtgtccgtgtttcactttttaccttttattatgcttatggtgacaatatatagcgttatatattggcatc

SEQ ID NO: 369 - DNA, 623 bp, Human rhinovirus A65
  source 1..623: mol_type = genomic DNA; strain = ATCC VR-1175
ttaaaactgggtgtgggttgcacccacccacactgtctacggacgtagtgctctcatattacggtatgcttgcacgccagtttgtttcccctttccccttttgtaactatagaagattgcacttaatctcgaccaataggcagtagtgatccacactacttacggtcaagcacttctgttaccccggtatgcggagaataggctctgaaaagggctgaagcttcaattatcgtcatccgcgcaattactacgcaaagcttagtaacttcccaagaaattctttggttggccgttccgctggtaccccaccagtaggcttggcagatgaggctgagtaatccccactggcgacagtgactcagcctgcgtggctgcctacacacctggtaacaggtgtgaagccatagaaaggacagggtgtgaagagccccgtgtgctaattgtgattcctccggcccctgaatgcggctaatctaaccccacatccaatgcgcataagccaatgcgtatttggtcgtaatgggcaactgtgggacggaaccgactactttgggtgtccgtgtttctttttattccttataattagttcatggtgacaagtataagtgtttatatttgtcatc

SEQ ID NO: 370 - DNA, 616 bp, Human rhinovirus A66
  source 1..616: mol_type = genomic DNA; strain = ATCC VR-1176
ttaaaactggatctaggttgttcccacctagatctcccatgtggagtagtactctattattacggtaattttgtacgccagttttatatccccttccccttttgtaacttagaagtcgtgaacacagaccaataggtggcgatcacccagatcgcttaaggtcaagcacttctgtttccccggtcaacgttgatatgctccaccagggcaaaaacaacggagatcgttatccgcaaggtgcctacgcaaagcctagtaacctcttggaggatatatggttggtcgctcagctataccccatagtagacctggcagatgaggctagaaactccccactggcgacagtgttctagcctgcgtggctgcctgcgcactcttatgagtgcgaagccatatatttgacaaggtgtgaagagccccgtgtgctcaccttgagtcctccggcccctgaatgtggctaaccctaaccctgcagctagtgcatgaaatccatcatgttgctagtcgtaatgagcaattgcgggatgggaccaactactttgggtgtccgtgtttcactttttccttttatatttgcttatggtgacaatatatatataacatatatattggcatc

SEQ ID NO: 371 - DNA, 611 bp, Human rhinovirus A67
  source 1..611: mol_type = genomic DNA; strain = ATCC VR-1177
ttaaaactggatctaggttgttcccacctagatctcccaagtggagtggtacactattatcacggtaattttgtacgccggttttatctccccttaccccaagtaacttagaagtattacataaagaccaacaggcagtgattatccagatcactaaaggtcaagcacttctgtctccccggtcaaagttgatatgctccaacagggcaaaaacaactgagatcgttatccgcaaagtgcctacgcagagcctagtaactaccttgaaattacttggttggtcgttccaccaaaccccatggtagacctggcagatgaggctagaaattccccactggtaacagtgttctagcctgcgtggctgcctgcacaccctttgggtgtgaagccaagtaatggacagggtgtgaagagccgagtgtgctcactttgagtcctccggcccctgaatgtggctaaccttaaccctgcagctagagcgcgcaaaccagcgtgtatctagtcgtaatgagcaattgcgggacgggaccaactactttgggtgtccgtgtttctttttattcttatatttgcttatggtgacaatatataattatttgtatattggcacc

SEQ ID NO: 372 - DNA, 622 bp, Human rhinovirus A68
  source 1..622: mol_type = genomic DNA; strain = ATCC VR-1178
ttaaaactgggtccaggttgttcccacctggatctcctacgtggagttgtactctattattccggtaattttgtacgccagttttatctcccctacccctctatgtaacttagaagtttatgcacagcggccaataggtgacatttatccaaaatgtcaaaggtcaagcacttctgttaccccggttagaattgatatgctccaacagggcaaaaacaattttgatcgttatccgcaaggcaactacgcaaagcctagtaccatttttgatgatgtgtggttggtcgctccactgtgaacccgacagtagacctggcagatgaggctagaaattccccactggtaacagtgttctagcctgcgtggctgcctgcgtacccttttgcgggtacgaagccatacatttgacaaggtgtgaagagccccgtgtgcttgccttgagtcctccggcccctgaatgtggctaaccttaaccctgcagctagtgtgcacaatccagtgcatggctagtcgtaacgagcaattgcgggatgggaccaactactttgggtgtccgtgtttcttgtttttcttttatatttgcttatggtgacaatatatacataatatatatattggcacc

SEQ ID NO: 373 - DNA, 625 bp, Human rhinovirus A71
  source 1..625: mol_type = genomic DNA; strain = ATCC VR-1181
ttaaaactgagtgtgggttgttcccacccacactgtctacggacgtagtgctctcatattccggtatgtttgcacgccagtttgcctctccttttcccacgtaacgttagaagcttatgcactaaatcgaccactaggtgagtgataaaccatatcattctttggtcaagcacttctgtttccccggtatgcagggaataggccctccccagggctgaagccttaattatcgttatccgcacatttactacgcaaagcctattagcgttctggaagttcactggctggtcgttccgctagactaacccgtctagtagacctggcagatgaggctggataaaccccactggcgacagtgatccagcctgcgtggctgcctgcacacctggaaacaggtgtgaagcccatgaatggacagggtgtgaagagccccgtgtgctaagtgtgagtcctccggcccctgaatgcggctaatctaaccccacagctaatacacacaaaccagtgtggatttagtcgtaatgggtaactgtgggacggaaccgactactttgggtgtccgtgtttccttttattccttttatattgcttatggtgacaggtatatagatatatatttgttacc

SEQ ID NO: 374 - DNA, 610 bp, Human rhinovirus A74
  source 1..610: mol_type = genomic DNA; note = Accession: DQ473494
ttaaaactgggtttgggttgatcccacccaaacctcccaagcggagtggtactctgttatttcggtaactttgtacgccagttttatattccctcccccctttaaactgtaaagctaagcacacagaccaatagctgacaatcatccagattgttaatggtcaagcacttctgtttccccggtcaacgttgatatgctccaacagggcaaaaacaactgcgatcgttatccgcaaagtgcctacgcaaagcctagtagcacctttgaagtcatttggttggtcgctccgctgttccccacagtagacctggcagatgaggctagaaataccccactggtgacagtgttctagcctgcgtggctgcctgcacaccctttgggtgtgaagccaaatcatggacaaggtgtgaagagccccgtgtgctcactttgagtcctccggcccctgaatgtggctaaccttaaccctgcagctagagtgcacaatccagtgcatttctagtcgtaatgagcaattgcgggatgggaccaactactttgggtgtccgtgtttcactttttacctattatttgcttatggtgacaatatatataattatatattggcacc

SEQ ID NO: 375 - DNA, 617 bp, Human rhinovirus A75
  source 1..617: mol_type = genomic DNA; note = Accession: DQ473510
ttaaaactggatccaggttgttcccacctggatcacccaatgggtgtagtatactgttattacggtaactttatacgacggttttatctcccccccccccttatgtaacttagaagttttgcacaccgaccaatagtggacaatcagccagattgttttaggtcaagcactactgtttcccccggtcaacgttgatatgctccgacagggcaaaaacaacagcgatcgttatccgcaaggtgcctacacagagcttagtaccgccttagaaggattgtggttggtcgctcagttgcaaccccagcaatagacctggcagatgaggctggacattccccactggtgacagtggtccagcctgcgtggctgcctgcacacctctatgaggtgtgaagccagaatttcgacaaggtgcgaagagccgcgtgtgctcaccttgaatcctccggcccctgaatgcggctaaccttaaacccgcagccatggtccacaatccagtggatgtatggtcgtaatgagtaattgtgggatgggaccgactactttgggtgtccgtgtttcctgttttttcttttatactgcttatggtgacaatatatatgatatatattggcacc

SEQ ID NO: 376 - DNA, 618 bp, Human rhinovirus A76
  source 1..618: mol_type = genomic DNA; strain = ATCC VR-1186
ttaaaactggatccaggttgttcccacctggatctcctacaaggagttgtactctattattgcggtaattttgtacgccagttttatctcccctccccgatatgtaacttagaagctgaacacaaagaccaataggtgacatttaatccaaaatgttaaaggtcaagcacttctgtttccccggccaaagttgatatgctccaacagggcaaaaacagctgcggtcgttatccgcaaaacaactacgcaaagcctagtaccaccttctagagcatgtggctggtcgctccactataaacccaatagtagacctggcagatgaggctaggagctcctcactggtaacagtgtcctagcctgcgtggctgcctgcgcaccctgacaggtgcgaagccaaatgtttgacaaggtgtgaagagccccgtgtgcttgttttgagtcctccggcccctgaatgtggctaaccttaaccctgcagctagtgtgtacaatccagtgcatagctagtcgtaatgagcaattgcgggatgggaccaactactttgggtgtccgtgtttcttatttttccttatatttgcttatggtgacaatgtatatataacgtatatattggcatc

SEQ ID NO: 377 - DNA, 613 bp, Human rhinovirus A77
  source 1..613: mol_type = genomic DNA; strain = ATCC VR-1187
ttaaaactggatccaggttgttcccacttggatcccccaagaggggtagtactctattattacggtaattttgtacgccagttttatctcccttaccccctttgtaacttagaagatttaaacacagaccaataggcgacgatcatccagatcgtttaaggtcaagcacttctgtttccccggtcaatgctgatatgctctaccagggcaaaaacagtagagatcgttatccgcaaggtgcctacacaaagcttagtaacattttgaagagcatttggttggtcgctcagctattaccccatagtagacctggcagatgaggctagaagttccccactggcgacagtgttcttgcctgcgtggctgcctgcgcactctcatgagtgcgaagccatatgtttgacaaggtgtgaagagccccgtgtgctcaccttgagtcctccggcccctgaatgtggctaaccttaaccctgcagctagtgcatgaaatccatcatgtaactagtcgtaatgagcaattgcgggatgggaccaactactttgggtgtccgtgtttcactttttccttttatatttgcttatggtgacaatatatatagcatatattgacacc

SEQ ID NO: 378 - DNA, 620 bp, Human Rhinovirus A78
  source 1..620: mol_type = genomic DNA; strain = RvA78/USA/2021/177499
ttaaaactgaatcatggttgttcccaccatgattacctacgggtgtagtacacttgtatcccggtacatttgtgcgccagttttatatcccctaccccaatcgtaacttagaagctgaacaacacaagatcaataggcggtggttatccaaaccatcaatgatcaagcacttctgtttccccggtaggtgtgaatatgctttaaccaaggcagaagctgatcctatcgttatccgcaaggtgcctacgggaagcctattaacactttgaaagagatttggctggtcgctcagttgcacaaccccatgcaatagacctggcagatgaggctagacaaaccccaccagcgatggtggtctagcctgcgtggctgcctgcacaccctttttgggtgtgaagccagagattggacagggtgcgaagagcccactgtgctcaccttgagtcctccggcccctgaatgtggctaatcctaaccctgcagctgttgcacaaaagccattgtgtatgcagtcgtaatgagcaattgcgggatggaaccaactactttgggtgtccgtgtttccttgttttctttattattgcttatggtgacaagtatatatagatatatttgtcatc

SEQ ID NO: 379 - DNA, 615 bp, Human rhinovirus A80
  source 1..615: mol_type = genomic DNA; strain = ATCC VR-1190
ttaaaactraatccaggttgttcccacctggatttcccacgaggagcagtactctactattccggtagttttgtacaccagttttatctcccttccccgtgtaacttagaagacaagcacttcagaccaataggatggtaactaaccaagttatcaaaggtcaagcacttctgtttccccggtcaaaattgatatgctccaccagggcaaaaacagttttgatcgttatccgcaaagtgcctacgcaaagcttagtaacactttgaagaatgtgtggttggtcgttccgctattccccatagtagacctggcagatgaggctagaaaatccccactggtgacagtgttctagcctgcgtggctgcctgcgcacctctttgaggtgcgaagccattcctttgacaaggtgtgaagagccccgtgtgctcactttgagtcctccggcccctgaatgtggctaaccttaaccctgcagctagtgcatgcaatccagcatgtctctagtcgtaatgagtaattgcgggatgggaccaactactttgggtgtccgtgtttctctttttacttttaaattgcttatggtgacaatatatatagtacatatatattgacacc

SEQ ID NO: 380 - DNA, 617 bp, Human rhinovirus A81
  source 1..617: isolate = F06; mol_type = genomic DNA
ttaaaactggatctgggttgttcccacccagatcacctacatggtgttgtacactattattacggtaattttgtacgccagttttatatccccttccccaaatgtaacttagaagcaatgcaaactgatcaatagggggcaatcatccagattgctaatgatcaagcacttctgtttccccggtcaaggttgatatgctccacaagggcaaaaacaaccgagatcgttatccacaagatgcctacgcaaagcctagtaatgcttttgaagatacttggttggtcgctcagctgtgcacccgacagtagacctggcagatgaggctagaagtacccctctggcgacagagttctagcctgcgtggctgcctgcacacccttttgggtgtgaagccaagtattggacaaggtgtgaagagccccgtgtgctcatcttgaatcctccggcccctgaatgtggctaaccttaaacctgcagccagtgcacacaaaccagtgtgtagctggtcgtaatgagcaattgcgggatgggaccaactactttgggtgtccgtgtttcactttttacctttatattgcttatggtgacaatatatatagcacatatatattgttatc

SEQ ID NO: 381 - DNA, 614 bp, Human rhinovirus A82
  source 1..614: mol_type = genomic DNA; strain = ATCC VR-1192
ttaaaactgggagtgggttgttcccacccagaccacccacgtggtgttgtgctctgttattccggtaaccttgcacgccaattttataaccccctttccccatgtaacttagaagttttgcacataggccaatagcaagcagcgaaccagctgtataaggtcaagcacttctgtttccccggtcaatgttgatatgcttcaacaaggcaaaaacaacagcgatcgttatccgcaagatgcctacacaaagcttagtacctcctttgacggtatttgtctggtcgctcaggtgtttccccagcactagacctggcagatgaggctagaaactccccactggtgacagtgttctagcctgcgtggctgcctgcacacccttctgggtgtgaagccaaatactagacaaggtgtgaagagccccgtgtgttcatcttgagtcctccggcccctgaatgcggctaaccttaaacccgcagccattactcacaatccagtgagcggatggtcgtaatgagcaattgtgggatgggaccgactactttgggtgtccgtgtttcatgtttttctttataatttgcttatggtgacaatatatagtgatatatattggcatc

SEQ ID NO: 382 - DNA, 612 bp, Human_rhinovirus A85
  source 1..612: mol_type = genomic DNA; strain = RvA85/USA/2021/AR424A
ttaaaactgagtccaggttgttcccacctggatttcctacatggagttgtactctgttattccggtaaccttgtacgccagttttatatccctttcccttttgtaacttagaagctaagcacacaggccaataggtggtgattatccaaatcactaatggtcaagcacttctgtttccccggtctaaactgatacgctccaacagggcgaaaacagtgcagatcgttatccgcaaagtgcctacgcaaagcttagtagcactttgaagaatctatggttggtcgctcagctataccccctagtagacctggcagatgaggctagaaataccccactggtaacagtgttctagcctgcgtggctgcctgcacacccttacgggtgtgaagccatatatttgacaaggtgtgaagagccccgtgtgctcactttgagtcctccggcccctgaatgtggctaaccttaaccctgcagctagtgcatgtaatccaacatgttgctagtcgtaatgagtaattgcgggatgggaccaactactttgggtgtccgtgtttcactttttaccttttatttgcttatggtgacaatatatatataatatatattggcatc

SEQ ID NO: 383 - DNA, 621 bp, Human rhinovirus A88
  source 1..621: mol_type = genomic DNA; note = Accession: DQ473504.1
ttaaaactgggagtgagttgtccccactcactctacccacgcggtgttgtacactgttattacggtaactttgtatgccagtttttgttcccctatccccctttaaagtaacttagaagcatgaacttacagaccaaaaggtgatgatcacccagatcattaaaggtcaagcacttctgtttccccggtcaatgaggatatgctttacccaaggcaaaaaccttaaagatcgttatccgcacattaactacgcaaagcctagtatcgcctttgatgtattaagactggtcgttccctgcatacccagcagtagacctggcagatgaagctggacgttccccactggcgacagtggtccagcctgcgtggctgcctgctcacccatttgggtgagaagccttattattgacaaggtgtgaagagccccgtgtgcttaatgtgaatcctccggcccctgaatgtggctaaccttaaccccgcagccgttactcacaatccagtgaaatgacggtcgtaacgcgaaagtgtgggatgggaccaactactttgggtgtccgtgtttcctattttttccttaatgtgtgttatatggtgacaatttatagcgtataagttgtcatc

SEQ ID NO: 384 - DNA, 616 bp, Human rhinovirus A90
  source 1..616: mol_type = genomic DNA; strain = ATCC VR-1291
ttaaaactgggttcaggttgttcccacctgaatctcctacatggagttgtactctattatcccggtaattttgtacgccagttttatcctcccctccccatgtaacttagaagctgtacacaacgaccaacaggtaacattcatccagagtgttaaaggtcaagcacttctgtttccccggtcaaagttgatatgctccaacagggcaaaaacaactgcgatcgttatccgcagagcaactacgcaaagcttagtaccactttcaatggtgtatggctggtcgctccactataaacccaatagtagacctggcagatgaggctagaaactccccactggtaacagtgttctagcctgcgtggctgcctgcgtgcccttttgggcacgaagccttacatttgacaaggtgcgaagagccccgtgtgcttgctttgagtcctccggcccctgaatgtggctaaccttaaccctgcagctagtgtgtgcaatccagcacatggctagtcgtaatgagcaattgcgggatgggaccaactactttgggtgtccgtgtttcttgtttttcttttatatttgcttatggtgacaatatatatagaatatatatattggcatc

SEQ ID NO: 385 - DNA, 615 bp, Human rhinovirus A94
  source 1..615: mol_type = genomic DNA; strain = ATCC VR-1295
ttaaaactggatctgggttgttcccacccagatcacccaagaggtgtagtgctctgtcattccggtgaccttgcacgccagttttatcaccccttccctcttgtaacttagaagaattaaactcagaccaataggaagcgacaagccagtcgtgacaggtcaagcacttctgtttccccggtcaaagttgatatgcttcaccaaggcaaaaacaacagcgatcgttatccgcaagatgcctacgcaaagcctagtagtgcctttgaaaatatttgtctggttgctcaagtacaaccccagtactaaacctggcagatgaggctggagcttccccactggtaacagtgttccagcctgcgtggctgcctgcacacccttacgggtgtgaagccaaatattggacaaggtgtgaagagccccgtgtgctcatcttgagtcctccggcccctgaatgcggctaaccttaaccccacagccattgctcacaatccagtgagtgtatggtcgtaacgagcaattgtgggatgggaccgactactttgggtgtccgtgtttctcttttttcctttttaattctgcttatggtgacaatatatagtgttatatattggcatc

SEQ ID NO: 386 - DNA, 608 bp, Human rhinovirus A95
  source 1..608: mol_type = genomic DNA; strain = ATCC VR-1301
ttaaaactgagttcaggttgttcccatctgaacttcccacgtggagtagtacactattattacggtaattttgtacgccagttttgcctccctccccaaatgtaacttagaagatgtacacaacggccaacaggcggtggttatccaaaccatcaaaggtcaagcacttctgtttccccggtcaatgttgatatgctccaacagggcaaaaacaactgcgatcgttatccgcaagatgcctacgcaaagcttagtaacactttggaagatttatggctggtcgttccactataccccatagtagacctggcagatgaggctagaaataccccactggtgacagtgttctagcctgcgtggctgcctgcgcaccctatgggtgcgaagccatacattggacaaggtgtgaagagccccgtgtgctcatcttgagtcctccggcccctgaatgtggctaaccttaaccccgcagccaatgcacacaatccagtgtgtttttggtcgtaatgagtaattgtgggatgggaccaactactttgggtgtccgtgtttcactttttcctttattatgcttatggtgacaatatatatacatatatattgacacc

SEQ ID NO: 387 - DNA, 617 bp, Human rhinovirus A96
  source 1..617: mol_type = genomic DNA; strain = ATCC VR-1296
ttaaaactgggtctgggttgtccccacctagatcacccaagtggtgtagtacactgttatttcggtaaccttgtacgccagttttataaccccctccccaaatgtaacttagaagctgtacacaacgaccaatagagggtaatcatccagattacttacggtcaagcacttctgtctccccggtttactttgatatgctccaacagggcaaaaacaaagtgaatcgttacccgcaagatgcctacgcaacgcctagtaacatcctgaattgtttatggttggtcgctcaattacaaccccagtaatagacctggcagatgaggctagatattccccactggcgacagtgatctagcctgcgtggctgcctgcacaccccttgtgggtgtgaagccataatcatgacagggtgcgaagagccacgtgtgctcatcttgagtcctccggcccctgaatgcggctaaccctaaccctgcagccattgcctacaaaccagtgggtatgtggtcgtaacgagaaattgcgggatgggaccgactactttgggtgtccgtgtttcactttttaccttatatttgcttatggtgacaatatatacgagtttatatattgacacc

SEQ ID NO: 388 - DNA, 607 bp, Human rhinovirus A98
  source 1..607: mol_type = genomic DNA; strain = RvA98/USA/2021/W58KP8
aaactgggtctaggttgttcccacctagatctcctacatggagttgtactctattattccggtaattttgtacgccagttttatatccctttccccatgtaacttagaagtttgacacaatgaccaataggcggcaattaaccaaattgctaaaggtcaagcacttctgtttccccggtcaagattgatacgctctaccagggcgaaaacagttgagatcgttatccgcaaagtgcctacgcgaagcttagtaacatcttgaagaatttatgactggtcgctccgccattacccatggtagacctggcagatgaggctagaaactccccactggtaacagtgttctagcctgcgtggctgcctgcacacccttacgggtgtgaagccatatatttgacaaggtgtgaagagcctagtgtgctcactttgagtcctccggcccctgaatgtggctaaccttaaacccgtagctagtgcacacaggccagtgtgtagctagtcgtaacgagcaattacgggatgggaccaactactttgggtgtccgtgtttcactttttacctttatatttgcttatggtgacaatatatagattatatattgacacc

SEQ ID NO: 389 - DNA, 611 bp, Human rhinovirus A100
  source 1..611: mol_type = genomic DNA; strain = ATCC VR-1300
ttaaaactgaatccagattgttcccatctggatttcctacatggagttgtactctattattccggtaattttgtacgccagttttatcaccccttcccccgtaacttagaagtttgaaacaaaagaccaataggaggtaactatccaagttactataggtcaagcacttctgtttccccggtcaaagttgatatgctccaccagggcaaaaacaattgagatcgttatccgcaaagtgcctacgcaaagcctagtagtatcttgaaaagcatgtggttggttgctccgctgtaccccacagtaaacctggcagatgaggctagaagttccccactggtgacagtgttctagcctgcgtggctgcctgcgcactctttgagtgcgaagccatatgtttgacaaggtgtgaagagccccgtgtgctcactttgagtcctccggcccctgaatgtggctaaccttaaccctgcagctagtgcatgcaatccagcatgtggctagtcgtaatgagcaattgcgggatgggaccaactactttgggtgtccgtgtttcacttttttccttttataattgcttatggtgacaatatatagtgatatatattgacacc

SEQ ID NO: 390 - DNA, 615 bp, Human rhinovirus A101
  source 1..615: mol_type = genomic DNA; strain = SC1124
ttaaaactgagtcatggttgttcccaccatgattacccacgggtgtagtatacttgtatcccggtacatttatacgccagttttataatccccaccccaaatgtaacttagaagcttgtacacaatgatcaataggatgatggctatccaagtcatctaagatcaagcacttctgtctccccggtgagtgtgaatatgctttacccaaggcaaaagctaatctcatcgttatccgcaaggtgcctacgggaagcctagtaatactctgaagatattttggttggtcgatcagttgcactcacccatgcaatagacctggcagatggggctaggcacacctcactggtaacagtggcctagcccgcgtggctgcctgcacaccttcgggtgtgaagccataatattgacagggtgtgaagagcctactgtgctcaccttgagtcctccggcccctgaatgtggctaatcctaaccccgtatccattgcacacaaaccagtgtgtctatggtcgtaatgggtaactacgggatggaaccaactactttgggtgtccgtgtttcttgtttttctttaatactgcttatggtgacattatatattgatatagtgtcatc

SEQ ID NO: 391 - DNA, 610 bp, Human rhinovirus A103
  source 1..610: mol_type = genomic DNA; strain = MCL-18-H-1122
tgggttgttcccacccacactgtctacggacgtagtactctcatatcacggtatgtttgtacgccagtttgccctcccccccccaaatgtaacttagaagtttgtactttataaaggccagtaggcgagtagtaaaccatactactcatggtcaagcacttctgtttccccggtatgcggagaataagctttaacaaaggctgaagcttcaattatcgttatccgcatgataactacgcaaagcttagtaacattttgaaagtttattggttggtcgctccactggaaaacccccccagtagacctggcagatgaggctaagtaatccccactggtgacagtgacttagcctgcgtggctgcctgcacacctggaaacaggtgtgaagccaagtaatggacaaggtgtgaagagccccgtgtgcttatcatgagtcctccggcccctgaatgcggctaatccaaccccacagctattgcacataatccaatgtgtatttagtcgtaacgggcaactgtgggacggaaccgactactttgggtgtccgtgtttcctttattctcatttaagtttcctatggtgacaaatataagtgattatatctgtcatc

SEQ ID NO: 392 - DNA, 626 bp, Human rhinovirus B3
  source 1..626: mol_type = genomic DNA; note = Accession: NC_038312.1
ttaaaacagcggatgggtaccccaccatccgacccactgggtgtagtactctggtacttcgtacctttgtacgcctgttcttcccattgtacccttcctgaacttccaacccaagtaacgttagaagctcaacatttagtacaacaggaagcaccacatccagtggtgtttagtacaagcacttctgtttccccggagcgaggtataggctgtacccactgccaaaaacctttaaccgttatccgccaaccaactacgtaaaagctagtagtattatgtttttaactaggcgttcgatcaggtggatttcccctccactagtttggtcgatgaggctaggaattccccacgggtgaccgtgtcctagcctgcgtggcggccaacccagcttatgctgggacgcctttttatagacatggtgtgaagactcgcatgtgcttggttgtgattcctccggcccctgaatgcggctaaccttaaccctggagccttgtgtcacaaaccagtgatgataaggtcgtaatgagcaattccgggacgggaccgactactttgggtgtccgtgtttcttatttttcttattattgtcttatggtcacagcatatatataacatatactgtgatc

SEQ ID NO: 393 - DNA, 625 bp, Human rhinovirus B4
  source 1..625: mol_type = genomic DNA; note = Accession: DQ473490.1
ttaaaacagcggatgggtttcccaccatccgacccactgggtgtagtgctctggtattttgtacctttgcacgcctgtttcccatttgtacccttccttaatctccttcccccgtaacgttagaagttttggaattttaaagtacaataggaagcgccacatccagtggtgttgcgtacaaatacttctgtttacccggagcgaggtataggttgtacccacggccaaaagcctttaaccgttatccgccaatcaactacgtaacggctagtatcatcttgcttttgatttggtgttcgatcaggtggtatcccccactagtctggtcgatgaggctaggaattccccacgggcgaccgtgtcctagcctgcgtggcggccagcccagcttttgctgggacgccttttcaaagacatggtgtgaagacctgcatgtgcttggttgtgagtcctccggcccctgaatgcggctaaccttaaccctggagcccagcagcataatccaatgttgtttgggtcgtaatgagcaattccgggacgggaccgactactttgggtgtccgtgtttccttttattcttacattgtcttatggtcacagcatatatattatatatactgtgatc

SEQ ID NO: 394 - DNA, 631 bp, Human rhinovirus B5
  source 1..631: mol_type = genomic DNA; strain = ATCC VR-485
ttaaaacagcgggtgggtatcccaccacccgacccactgggtgtggtacactggtactttgtacctttgtatgcctgtttgcttccactcccctttacctaatattcttccccaagtatattttgcggtaacgttagaagaagcaaagttagtgcaataggatgtatcacaaccagtggtataaagcacaagcaattcttgttccccggagctggatatagactgctaacgtggtcaaaagtccttaaccgttatccgccagctaactgcgagaagactagtaacaccatgtttgtttttagacgttcgatcaggtgaataccccattcactagtttggtcgatgaggctgagaataccccacaggtaactgtgtctcagcctgcgtggcggccaacccgactcatgtcgggacgcctactaatagacatggtgtgaagatcctattgcgcttagttgtgagtcctccggcccctgaatgcggctaaccctaaccccggagccttgtggtgtaaaccaacatttgcaaggtcgtaatgagtaattctgggatgggaccgactactttgggtgtccgtgtttcctttatttttattgtgtgtgtcttatggttacaaatacaatttgtaatc

SEQ ID NO: 395 - DNA, 627 bp, Human rhinovirus B6
  source 1..627: mol_type = genomic DNA; note = Accession: DQ473486.1
ttaatacagcggatgggtatcccaccatccgacccactgggtgtagtactctggtattatgtacctttgtacgcctgttcttcccattgtacccttcccaaatttccaacccaagtaacgttagaagtttgacattaaagtacaataggaggcaccacatccagtggtgttttgtacaagcacttctgtttccccggagcgaggtataggctgtacccactgccaaaaacctttaaccgttacccgccagccaactacgtaaaagctagtaacatcttgtttgtaacttggcgttcgatcaggtggattccccctccactagtttggtcgatgaggctaggaactccccacgggtgaccgtgtcctagcctgcgtggcggccaacccagctcttgctgggacgcccttttatagacatggtgtgaagactcgcatgtgcttggttgtgattcctccggcccctgaatgcggctaaccctaaccctggagccttgtgttacaaaccagtaatattaaggtcgtaatgagcaattccgggacgggaccgactactttgggtgtccgtgtttctcatttttcttattattgtcttatggtcacagcatatttgttaaatatactgtgatc

SEQ ID NO: 396 - DNA, 618 bp, Human rhinovirus B17
  source 1..618: mol_type = genomic DNA; note = Accession: EF173420
tttaaacagcggatgggttccccaccatccgacccactgggtgtagtactctggtattttgtacctttgtacgcctgtttctcccctacctcccaacctaaacaatcctggtaacttagaagacttaaatcatcgtacaataggtgctgtcacatccagtgacggctagtacaagcacttctgtttccccggagcggagtataaatggccaccgctgtcaaaagctcttaaccgttatccgccaattaactacgcaacggctagtaacatcttgttatttttagggcgttcgatcaggtgagtaaacccctcactagtctggtcgatgaggctgagaattccccacgggcgaccgtgtctcagcctgcgtggcggccagcccagctaatgctgggacgccttaattgtgacatggtgtgaagacccacgtgtgcttaattgtgagtcctccggcccctgaatgcggctaacctaaaccctggagccttgagacacaatccagtgttggcaaggtcgtaatgagtaattccgggacgggaccgactactttgggtgtccgtgtttccttttattttcaaattgttcttatggtcacaatataagtaatatattgtgatc

SEQ ID NO: 397 - DNA, 632 bp, Human rhinovirus B26
  source 1..632: mol_type = genomic DNA; strain = ATCC VR-1136
ttaaaacagcgggtgggtatcccaccacccgacccactgggtgttgtacactggtattttgtacctttgtatgcctgtttgcacctccccaccccttccaattacccttacccgaattrtattatgcggtaacattagaagaagtgaacacagtgcaataggacgtatcacatccagtgatataaagcacaagcaattcttgttccccggagctggatatagactgctaacgtggttgaaggtccttaaccgttatccgccaaccaactacgagacggctagtaatatcatgtttgtctttgagcgttcgatcaggtgaattccccattcactagtttggtcgatgaggctgagaactccccacaggtgactgtgtctcagcctgcgtggcggccaacccagccacggctgggacgcccactgatagacatggtgtgaagacccaattgtgcttggttgtgactcctccggcccctgaatgcggctaacctcaaccccggagccttgtagtgtaagccaacacatacaaggtcgtaatgggcaactctgggacgggaccgactactttgggtgtccgtgtttcctttatttttatcttttgtgtcttatggttacaagtattgattgtaacc

SEQ ID NO: 398 - DNA, 622 bp, Human rhinovirus B35
  source 1..622: mol_type = genomic DNA; strain = ATCC VR-1145
ttaaaacagcggatgggttccctaccatccgacccactgggtgtagtactctggtactctgtacctttgtacgcctgtttatccactacccttttcctaaattttccacccgtgtaaccttagaagcaaacaaattgtacaatagggtgcatcacaaccagtgatgtacagtacaagcacttctgtttccccggagcggggtatagacggtcaccactgtcaaaagcccttaaccgttacccgccaaccaactacgtaacggctagtaacaccatgaatttgtcttgacgttcgatcaggtggtaaccccccactagtttggtcgatgaggctgagaactccccacgggtaaccgtgtctcagcctgcgtggcggccaacccagcttctgctgggacgccaattcattgacatggtgtgaagacctgcatgtgcttggttgtgattcctccggcccctgaatgcggctaaccctaaccccggagccacgcggcataatccaatgtcgtatgggtcgtaatgagtaattctgggatgggaccgactactttgggtgtccgtgtttcctgtttttccaaattattcttatggtcacagcatataaatagatatatactgtgatc

SEQ ID NO: 399 - DNA, 630 bp, Human rhinovirus B37
  source 1..630: mol_type = genomic DNA; note = Accession: EF173423
tttaaacagcggatgggtatcccaccatccgacccactgggtgtagtactctggtattttgtacctttgtacgcctgttgttcctaatgtacccaccctaaaacttcctacccaagtaacgttagaagtttcatcaacaagtacaataggaagcatcacatccagtggtgttttgtacaagcacttctgtttccccggagcgaggtataggctgtacccactgccgaaagcctttaaccgttatccgccaaccaactacgtaaaagctagtatcatcatgttttaaaataggcgttcgatcaggtggatcccccctccactagtttggtcgatgaggctaggaactccccacgggtgaccgtgtcctagcctgcgtggcggccaacccagcttctgctgggacgcctttttatggacatggtgtgaagactcgcatgtgcttggttgtgactcctccggcccctgaatgcggctaaccttaaccccggagccctgtgttgcaatccagtaacattagggtcgtaatgagcaatttcgggacgggaccgactactttgggtgtccgtgtttctcatttttcttattattgtcttatggtcacagcatatatataacgtatatactgtgatc

SEQ ID NO: 400 - DNA, 632 bp, Human rhinovirus B42
  source 1..632: mol_type = genomic DNA; strain = ATCC VR-338
ttaaaacagcgggtgggtatcccaccacccgacccactgggtgtggtacactggtactttgtacctttgtatgcctgtttgcatccccttccctttacctaacatccctccccaagttatattttgcggtaacgttagaagaagtgaacytagtgcaacaggaagtatcaccaccagtgatataacgcacaagcaattcttgttccccggagctggatatagactgctaacgtggttgaaagtccttaaccgttatccgccagttaactgcgaaaagactagtaacatcatgcacatttctaggtgttcgatcaggtgaaaaccccattcactagtttggtcgatgaggctgagagtaccccacaggcgactgtgtctcagcctgcgtggcggccaacccgacttatgtcgggacgcctattaatagacatggtgtgaagatcctattgcgcttagctgtgagtcctccggcccctgaatgcggctaaccttaaccccggagtcttgtgatgtaagccaacatttgcaaggtcgtaatgagtaattctgggatgggaccgactactttgggtgtccgtgtttcctttattcttatcatttgtgtttcatggttacaagcattgtttgtaatc

SEQ ID NO: 401 - DNA, 622 bp, Human rhinovirus B48
  source 1..622: mol_type = genomic DNA; note = Accession: DQ473488
ttaaaacagcggatgggtatcccaccatccgacccactgggtgtagtactctggtactctgtacctttgtacgcctgtttctcctcaaccctcccctacccgttatatatctcagtaacttagaagatatcattaccgcacaatagggaccgttgtaaccagcaacggtcagtgcaagcacttctgtttccccggagcggagtatagacggccactgctgtcaaaagctcttaaccgttacccgccagttaactacacaacagctagtaacatcttgttgttcttagggcgttcgatcaggtgagtttaccccctcactagtctggtcgatgaggctgagaaatccccacgggtgaccgtgtctcagcctgcgtggcggccagcccagcttatgctgggacgccttaagtatgacatggtgtgaagactcgcgtgtgcttagctgtgagtcctccggcccctgaatgcggctaacctaaaccccggagccttgaggcacaatccagtgcccgcgaggtcgtaacgagaaattctgggacgggaccgactactttgggtgtccgtgtttccttttatctttttgatgttcttatggttacaatatataaagtatattgtaatc

SEQ ID NO: 402 - DNA, 624 bp, Human rhinovirus B52
  source 1..624: isolate = F10; mol_type = genomic DNA
ttaaaacagcggatgggtatcccaccatccgacccactgggtgtagtacyctggtattatgtacctttgtacgcctgtttctccctccctactaccccgcctcaagcatcctgtaacttagaagaattgaaaaaccgcacaacaggagctattacaaccagtaatagttagtgcaagcacttctgtttccccggagcggagtatagacggccaccgctgtcaaaagctcttaaccgttatccgccagttaactacgtaacggctagtaacatcttgttgtgcttagggtgttcgatcaggtgaagaaaaacccccttcactagtctggtcgatgaggctgagaagtccccacgggcgaccgtgtctcagcctgcgtggcggccagcccagcatatgctgggacgccttaagtatgacatggtgtgaagacccgcatgtgcttaactgtgagtcctccggcccctgaatgcggctaacctaaaccctggagccttggagcacaagccagtgcttacaaggtcgtaatgagcaattccgggacgggaccgactactttgggtgtccgtgtttccttttatctcattattgttcttatggttacaatatatagagtatattgtaatc

SEQ ID NO: 403 - DNA, 620 bp, Human rhinovirus B69
  source 1..620: mol_type = genomic DNA; strain = ATCC VR-1179
ttaaaacagcggatgggtatcccaccatccgacccactgggtgtagtactctggtactttgtacctttgtacgcctgtttctccctcccttcccaacctaaacaatccttgtaacttagaaggtttcgattatcgcacaatagggactattgcaaccagcaatagtcagtgcaagcacttctgtttccccggagcggagtgtagatggccaccgctgtcaaaagctcttaaccgttatccgccagttaactacgcaacggctagtagtgccttgttgcttttatggcgttcgatcaggcgagatttaccccctcgctagtctggtcgatgaggctgagaattccccacgggcgaccgtgtctcagcctgcgtggcggccagcccagcctttgctgggacgccttgattgcgacatggtgtgaagacccgcgtgtgcttaactgtgagtcctccggcccctgaatgcggctaacctaaaccctggagccttgaaacacaacccagtgttcgcaaggtcgtaacgagcaattccgggacgggaccgactactttgggtgtccgtgtttcctttattctttcaattgttcttatggtcacaatataagtgttatattgtgatc

SEQ ID NO: 404 - DNA, 622 bp, Human rhinovirus B70
  source 1..622: mol_type = genomic DNA; note = Accession: DQ473489
ttaaaacagctgatgggttccccaccatccgacccaatgggtgtagtactctggtattctgtacctttgtacgcctgtttctccccacccccccgtcctaaataatcccagtaacttagaagatttgaattatcgtacaataggtgctgtcacatccagtgatggctagtacaagcacttctgtttccccggagcggagtatagatggccaccgctgtcaaaagctcttaaccgttatccgccaattaactacgcaacggttagtaacatcttgtcatttttgaggcgttcgatcaggtgagtacacccctcactagtctggtcgatgaggctgagaattccccacgggcgaccgtgtctcagcctgcgtggcggccagcccagcttatgctgggacgccttaattgtgacatggtgcgaagacccacgtgtgcttaattgtgagtcctccggcccccgaatgcggctaacctaaaccccggagccttgagacacaatccagtgttagcaaggtcgtaacgagcaattctgggacgggaccgactactttgggtgtccgtgtttcctgttattctcaaattgttcttatggtcacaatataagtaatatatatattgtgatc

SEQ ID NO: 405 - DNA, 630 bp, Human rhinovirus B72
  source 1..630: mol_type = genomic DNA; strain = ATCC VR-1182
ttaaaacagcggatgggttctcccaccatccgacccactgggtgtagtactctggtatgatgtacctttgtacgcctgtttattcccaaacccccacccgttattcgcccaacccctgtaacgttagaagtttggaacttaattgtacaatagggagcaccatatccaatggtgtaacgtacaagcacttctgtttccccggagcgaggtataggtggtacccactgccgaaagcctttaaccgtcatccgccaatcaactacgtaacagctagtaacatcttgttgttgattggacgttcgatcaggtggttcaccccccactagtttggtcgatgaggctgggaatcccccacgggtgaccgtgtcccagcctgcgtggcggccaacccagcttatgctgggacgccctttcaatgacatggtgtgaagactcgcatgtgcttgattgtgagtccgccggcccctgaatgcggctaaccctaaccctggagccttgcaccacaatccagtggtgtctgggtcgtaatgagtaattctgggatgggaccgactactttgggtgtccgtgtttctcatttttcttttaattgtcttatggtcacagcatatagtattatatactgtgatc

SEQ ID NO: 406 - DNA, 624 bp, Human rhinovirus B79
  source 1..624: isolate = ZB/CHN/18; mol_type = genomic DNA
ttaaaacagcggatgggtatcccaccatccggctcactgagcgtagtactctggtataatgtacctttgtacgcctgttttcccaaaattccccatcctttacatttcctaccccgtaacataagaagctttcaaacagtacaataggaagcaccacatccagtggtgttatgtacaagcacttctgtttccccggagcgaggtataggcggtcaccactgccaaaagcctttaaccgttatccgccaaccaactacgtaatggctagtaacaccattgatttaaattgacgttcgatcaggtggtatccccccactagtttggtcgatgaggctaggaataccccacgggtgaccgtgtcctagcctgcgtggcggccaacccagcgtatgctgggacgccagtttaatgacatggtgcgaagacttgcatgtgcttggttgagactcctccggcccctgaatgcggctaaccttaaccccggagccttgcagcataatccaatgttgttgaggtcgtaatgagcaattctgggatgggaccgactactttgggtgtccgtgtttcctgtttttctttacattgtcttatggtcacagcatatatattgtatatactgtgatc

SEQ ID NO: 407 - DNA, 626 bp, Human rhinovirus B83
  source 1..626: mol_type = genomic DNA; strain = ATCC VR-1193
ttaaaacagcggatgggtatcccaccatccgacccactgggtgtagtactctggtattttgtacctttgtacgcctgtttcttccctttgtacccgccccttaaacttccaccccacgtaacgttagaagtttatacaagcagtacaataggttgcaccataaccagtggtgtttcgtacaagcacttctgtttccccggagcggggtatagacggtacccactgtcaaaagcccttaaccgttatccgccaatcaactacgtaatggctagtaacaccatgaaggtaagttgacgttcgatcaggtggtaacccccactagtttggtcgatgaggctaggaattccccacgggtaaccgtgtcctagcctgcgtggcggccaacccagcatttgctgggacgccaatttactgacatggtgtgaagacttgcatgtgcttgattgtgactcctccggcccctgaatgcggctaaccttaaccccggagccttgcagcataatccaatgttgtggaggtcgtaatgagcaattctgggatgggaccgactactttgggtgtccgtgtttcctgttttctttaagttgtcttatggtcacagcatatatactatatatactgtgatc

SEQ ID NO: 408 - DNA, 621 bp, Human rhinovirus B84
  source 1..621: mol_type = genomic DNA; strain = ATCC VR-1194
ttaaaacagcggatgggtatcccaccatccggcccactgggcgtagtacactggtattctgtacctttgtacgcctgtttgccgcccctcccccttttattaccacatttgtggtcgctgcaacgttagaagattttaaagtagtgcaataggaagcatcacaaccagtggtgttatgcacaaacacttctgtttccccggagcgaggtatagacggtccccactgtcaaaagcctttaaccgttatccgccaaccaactacgagacagctagtaatgccctgttctcctgcaaggcgttcgatcagacagatttcccctctgttagtctggtcgatgaggctagaagtaccccacaggtaactgtgttctagcctgcgtggcggccagcccagcttctgctgggacgcctttcaagagacatggtgtgaagactcaattgtgcttggttgtgagtcctccggcccctgaatgcggctaaccttaaacccggatccatgctatgcaaaccagcatagttatggtcgtaatgggcaactctgggatgggaccgactactttgggtgtccgtgtttccatttttactttttgtgtcatttatggttacaattaagttgtaacc

SEQ ID NO: 409 - DNA, 631 bp, Human rhinovirus B86
  source 1..631: mol_type = genomic DNA; strain = ATCC VR-1196
ttaaaacagcggatgggtaccctaccatccgacccactgggtgtagtacactggtacattgtacctttgtacgcctgtttctccctattgtaccttccctcacaatcctaacccctgtaacgttagaagatgtgcaactcgtgcaataggagatactgcaaccagtggtatcaagcacaagaacttctgtttcctcggagcggagtatagatggtccccaccgtcaaaagctcttaaccgttatccgccaatcaactacgtgacgactggtagcaycattttgacactttgacgttcgatcaggtaggcttaccccacctactagtttggccgatgaggctgggagtccctcacaggtaactgtgtcccagcctgcgtggcggccaacccagcaattgctgggacgccaatttgttgacatggtgtgaagatcttaatgtgcttggttgtgagtcctccggcccctgaatgcggctaaccttaaccccggagccttgtgtcacaagccagtgacattaaggtcgtaatgagtaatttcgggatgggaccgactactttgggtgtccgtgtttcctgtttttctttatgattgtcttatggtcacagcatatagtaattatatactgtgatc

SEQ ID NO: 410 - DNA, 598 bp, Human rhinovirus B91
  source 1..598: mol_type = genomic DNA; strain = RvB91/USA/2021/95333
cccaccatccgacccactgggtgtagtactctggtactttgtacctttgtacgcctgtttctccccccctcccaacccacacaatcctggtaacttagaagttttgaactattgtacaacaggagctgccacatccagtggtggttagtacaagcacttctgtttccccggggcggagtatagacggccaccgctgtcaaaagctcttaaccgttatccgccaattaactacgcaacggctagtaatgtcatgttgctattagggcgttcgatcaggtgagtgctcccctcactagtctggtcgatgaggctgagaattccccacgggtgaccgtgtctcagcctgcgtggcggccagcccagcttatgctgggacgccttaattgtgacatggtgtgaagacccacgtgtgcttaattgtgagtcctccggcccctgaatgcggctaacctaaaccctggagccttgagacacaatccagtgttggcaaggtcgtaatgagcaattccgggacgggaccgactactttgggtgtccgtgtttccttttatttccaaattgttcttatggtcacaatataagtgtacatattgtgatc

SEQ ID NO: 411 - DNA, 627 bp, Human rhinovirus B92
  source 1..627: mol_type = genomic DNA; strain = ATCC VR-1293
ttaaaacagcggatgggtatcccaccatccggcccactgggtgtagtactctggtacattgtacctttgtacgcctgttttccccctcttgtacccgcccttcaagctccttgcccaagtaacgttagaagtttgaacattggtacaataggaagcatcacatccagtggtgtactgtacaaacacttctgttgccccggagcgaggtatagatggtccccaccgtcaaaagcctttaaccgttatccgccaatcaactacgtaatggctagtagcaccttggatttaagttggcgttcgatcaggtggtaacccccactagtttggtcgatgaggctaggaattccccacgggtgaccgtgtcctagcctgcgtggcggccaacccagcatccgctgggacgccaatttaatgacatggtgtgaagacctgcatgtgcttgattgtgagtcctccggcccctgaatgcggctaaccctaaccccggagccttgcagcacaatccagtgttgttaaggtcgtaatgagcaattctgggatgggaccgactactttgggtgtccgtgtttcttatttttcttgaatttttcttatggtcacagcatatatacattatatactgtgatc

SEQ ID NO: 412 - DNA, 628 bp, Human rhinovirus B93
  source 1..628: mol_type = genomic DNA; note = Accession: EF173425
ttaaaacagtggatgggtttcctaccatccgacccactgggtgtagtgctctggtatattgtacctttgcacgcctgttttcccattgtacccttccttaaattcctccccatgtaacgttagaagtttaagaacataaatgtacaataggaagcatcacatccagtggtgtatggtacaagcacttctgtttatccggagcgaggtataagcggtacccactgctgaaagcctttaaccgttaaccgccaatcaactacgtaacggctagtattaccttgtttgcaatctggcgttcgatcaggtggttccccccactagtttggtcgatgaggctaggagttccccacgggcgaccgtgtcctagcctgcgtggcggccaacccagcatttgctgggacgcctttttgtagacatggtgtgaagacctgcatgtgcttgattgtgagtcctccggcccctgaatgcggctaaccttaaccccggagccttgtgacataatccaatgtcattaaggtcgtaatgagcaattctgggacgggaccgactactttgggtgtccgtgtttctctttattctttacattgtcttatggtcacagcatatataatacatatatactgtgatc

SEQ ID NO: 413 - DNA, 625 bp, Human rhinovirus B97
  source 1..625: mol_type = genomic DNA; strain = ATCC VR-1297
ttaaaacagcggatgggtttcccaccatccgacccactgggtgtagtgctctggtattttgtacctttgcacgcctgtttcccctttgtacccatcctgaatttcctccctctgcaacgttagaagtttgtgaaattaaaagtacaataggaagcatcacatccagtggtgttcagtacaagcactcctgtttccccggagcgaggtataggttgtacccacgaccgaaagcctttaaccgttatccgccaatcaactacataacggctagtatcatcatgtttttgatctggcgttcgatcaggtggtttcccccactagtctggtcgatgaggctaggatttccccacgggcgaccgtgtcctagcctgcgtggcggccagcccagcttatgctgggacgcctttttaaagacatggtgtgaagacctgcatgtgcttgattgtgagtcctccggcccctgaatgcggctaaccttaaccctggagcccgacagcataatccaatgttgtttgggtcgtaatgagcaattccgggatgggaccgactactttgggtgtccgtgtttctttttattcttatattgtcttatggtcacagcatatatagtatatatactgtgatc

SEQ ID NO: 414 - DNA, 625 bp, Human rhinovirus B99
  source 1..625: mol_type = genomic DNA; strain = ATCC VR-1299
ttaaaacagcgggtgggtatcccaccacccgacccactgggtgtagtacactggtattttgtacctttgtatgcctgtttgccatccctccctctcctcttacccttacccttattttgcggtaactttagaagtttgtaaatcacgcgcaatagggtataccacatccagtggtatgaagcacaagcaattcttgttccccggagctggatataaactgctaacgtggttgaaagtccttaaccgttatccgccagttaactgcgagaagactagtaactccatgtttgtttttaagcgttcgatcaggtggataccccattcactagtttggtcgatgaggctgggaatcccccacaggtaactgtgtctcagcctgcgtggcggccaacccagcttttgctgggacgcttactgacagacatggtgtgaagatcctattgcgcttaactgtgagtcctccggcccctgaatgcggctaacctcaaccccggagccttgtggtgtaaaccaacactcgcaaggtcgtaacgagtaattctgggacgggaccgactactttgggtgtccgtgtttcctttatttcttattgattgtctcctatggttacaaatttactgtaatc

SEQ ID NO: 415 - DNA, 557 bp, Human rhinovirus C2
  source 1..557: isolate = 470389; mol_type = genomic DNA
cttgtgctccggtacacttgcacgccagtttgcctccccatccccgagtaacttagaagtttacaccatgaccaacaggaggtggtaaaccataccacttacggtcaagcacttctgtttccccggcacgagaggaatagactcttttagggttgaagccacgagtgtcgttacccgcgctagtactacgcaaagcctagtaataccttgaagctcttctggttggtcgttccactagtcacgccctagtagacctggcagatgaggcaggacactccccactggtgacagtggtcctgcctgcgtggctgcctgcacaccctccggggtgtgaagccagaagaaggacaaggtgtgaagagccccgtgtgctactagtgagtcctccggcccctgaatgcggctaatcttaccccacagctattgcacacaatccagtgtgtatgtagtcgtaatgagcaattgtgggacggaaccgactactttgggtgtccgtgtttccttttattcttatgtttttgcttatggtgacaatacagacatatagtgttgttacc

SEQ ID NO: 416 - DNA, 483 bp, Human rhinovirus C6
  source 1..483: mol_type = genomic DNA; strain = RvC6/USA/2021/LCP8K8
ccaataggtggtgaccatccaggtcactaacggtcgagcacttctgtttccccggtacccttgtatacgcttcacccgaggcgaaaaacgaggttatcgttatccgcaaagtgcctacgagaagcctagtagcacttttgaaacctatggctggtcgctcagctgcacacccagcagtagacctggcagatgaggctagacactcctcaccagcgatggtggtctagcctgcgtggctgcctgcacaccctatcgggtgtgaagccaaaagtggacaaggtgtgaagagcctattgtgctcactttgagtcctccggcccctgaatgtggctaatcctaaccccgtagctgttgcatgcaacccagcgtgtatgcagtcgtaatgggcaactatgggatggaaccaactactttgggtgtccgtgtttcttgttttacttttcattgcttatggtgacaattgtaattaatacacttgttacc

SEQ ID NO: 417 - DNA, 579 bp, Human rhinovirus C8
  source 1..579: mol_type = genomic DNA; strain = RvC8/USA/2021/7N6PM0
gtagtactcttgtactccggtacacttgtacgccagttttccctccctacccccccttgggtaacttttagaagcatttgcactcagacgaataggcaaccaacactccatgttggtcaacgtcaagcacttctgtttccccggtattagggtgttaggctttccaagaggctgaagcctgaagtatcgttacccgcacaattactaagcagagcctagtaccattttgaccctttcactggctggtcgttcaatgagaaaacccactcatagacctggcagatggggctggaaataccccactggtaacagtgttccagcccgcgtggctgcctgtcccccatcttgggggaaagccaatgtaaggacaaggtgtgaagagccgcgtttgctaattgtgagtcctccggcccctgaatgcggctaatcttaccccacagctattgcatggaagccaccatgtggatagtcgtaacgggcaactgtgggacggaaccgactactttgggtgtccgtgtttccttttattccatttattatctcatggtgacaacgtatacagattatatgttgttcacc

SEQ ID NO: 418 - DNA, 639 bp, Human rhinovirus C9
  source 1..639: mol_type = genomic DNA; strain = RvC9/USA/2021/96D92H
ttaaaacagccgtgtggttgtacccaccaccgggcacattgtgcgtggtacactggaattacggttcctttgtacgcctgttttccctccccgctttctttctttcttcacttcttgatcgtaacataattagaagcatgacacacagtccaataggaggcggttaatccataaccgtcacggacaagcacttctgtttccccggatgtgtgaataggcttccaccgaggctgaagctgtagcattcgttatccgcacacgtactacgcgaaaactagtaacaccttgattggtggtgtggtgtttcattcagcgctaccccagcgtagatcagggcaatggggctacggaaaccccaccggcgacggtgtcgtagcccgcgtggtgccctgcccagatccttgtgatctgggacaccataccattgacagggtgtgaagattctagtgtgctacgtgtgagtcctccggcccctgaatgtggctaaccttaaccccgcagctatggtgtgcaaaccagcacattcgtagtcgtaatgggcaactgtgggacgggaccaactactttgggtgtccgtgtttccttttattcttataattttccttatggttacaggcttacggttataagtttgtaatc

SEQ ID NO: 419 - DNA, 587 bp, Human rhinovirus C10
  source 1..587: mol_type = genomic DNA; strain = QCE
catggttacccacgaggtgcagtggtcttgtattacggtacatttccataccagttttataaaccctaccctgaaacttatagaagcttgtacacaccgaccgacaggtggcaatcatccagattgtcgaaggtcaagcacttctgtttccccggtatccttgtatacgcttcacccgaggcgaaaaccgaggttatcgttacccgcaaagtgcctacgagaagcctagtatcactttggaaacctatggttggtcgctcagctgttttcccaacagtagacctggcagatgaggctggacgctccccaccagcgatggtggtccagcctgcgtggctgcctgcacaccctgtggggtgtgaagccagaaagtggacaaggtgtgaagagcctattgtgctcactttgagtcctccggcccctgaatgtggctaatcctaaccccgtagctgttgcatgtaatccaacatgtatgcagtcgtaatgggcaactatgggatggaaccaactactttgggtgtccgtgtttcttgtttttctttatatactgcttatggtgacaatagtaattcattactcttgttacc

SEQ ID NO: 420 - DNA, 613 bp, Human rhinovirus C11
  source 1..613: mol_type = genomic DNA; strain = SC9849
ttgatcccaccagcgggcacaatgtgcgttgtacactgcgatctcggtcgctttgtatgcctgtttttaccacccaccccaactttactgtcttctttatttcacaagtaacatagaagcatgtacatgatgcccagtaggataacgtcccagacggctgttttaagggcaagcacttctgtttccccggatgtgtgaataggcttcacccgaggctgaaactgtagcattcgttatccgcatggctactacgcgactgctagtagcattctgtatggcatgtggggtttcgctcagcagagacccagtctgtagatcagggtaatgaggctacacaatccccactggtgacagtggtgtagcctgcgtggtgccctgcccgaggttcatcctcgggaccctccatgttagacagggtgtgaagacactagtgtgctagtcatgagtcctccggcccctgaatgcggctaatcttaaacctgcagccatcgcatgcatgccagcgtgtaggtggtcgtaatgagtaattgcgggatggaaccgactactttgggtgtccgtgtttccctttttacatttgtgtgtctcttatggttacatcattggtgtaatc

SEQ ID NO: 421 - DNA, 599 bp, Human rhinovirus C12
  source 1..599: mol_type = genomic DNA; strain = RvC12/USA/2021/044858
tgtacccacccacactgtctacggacgttgtacacttgtattccggtacacttgtacgccagtttgccaccctatacaccccgtaacagtagaagtttacacacacccagaccaatagggggtgttcatccagttcacccagggtcaagcacttctgtttccccggcataggggtgttaggtttcacccgaggccgaagctccgattgtcgttatccgcacaactactggacaaagcttagtaacatcttacgatgtagcatggttggttgttccgccagtaccccctggtaaacctggcagatggggctagaagttcctcactggtgacagtgttctagcccgcgtggctgcctgctccctcacgggagaagccatcctattgacaaggtgtgaagagccccgtacgctagttgtgattcctccggcccctgaatgcggctaatccaaccctgcagccattgcatggaagccaccatgtggatggtcgtaatgagtaattgcgggacggaaccgactactttgggtgtccgtgtttcttgtttttcttttactgacgtttatggtgacaatatatatataacgtatatattgttcatc

SEQ ID NO: 422 - DNA, 533 bp, Human rhinovirus C15
  source 1..533: mol_type = genomic DNA; strain = RvC15/USA/2021/SUSM75
ttgccccccccccttccttccctgtaacgtagaagcattgtaaacggaccaaaaggggacggcaaaccacgtcgttcaaggtcaagcacttctgtttccccggcatgcgaggaatagaccttttcaagggttgaagccacaagtgtcgttacccgcattggtactacacagagcctagtactgctctagaaacttattggttggtcgttcagccatttcccctggtagacctggcagatgaggcaagaagttccccactggtgacagtgttcttgcctgcgtggctgcctgcacaccctaacgggtgtgaagccaataagtggacagggtgtgaagagccgcgtgtgctaccagtgagtcctccggcccctgaatgcggctaatccaaccccacagctatggcatgcaagccagcatgtgcgtagtcgtaatgagcaattgtgggacggaaccgactactttgggtgtccgtgtttcctttattctcttatgttttgcctatggtgacaatattaagtgttaatattgctacc

SEQ ID NO: 423 - DNA, 572 bp, Human rhinovirus C17
  source 1..572: mol_type = genomic DNA; strain = RvC17/USA/2021/T3RVH2
gtacacttgtattacggtacatttgtacgccagtttgcctcccttccctaccttgtaactttagaagatacaactacatgacaaataggaagccaacaagccatgttggttattgtcaagcacttctgttaccccggtactagggtgttaaacttccccagaggttgaagcccgatgtatcgttatccgcatgattactaagcagagcctagtaacatcttactttatatatgggttggtcgctcagtcagttaccccctgatagacctggcagatgaggctggaaacaccccactggtaacagtgttccagcctgcgtggctgcctgcccctcttctgaggggaagcccatatgtagacaaggtgagaagagccgcgtttgctaatcatgagtcctccggcccctgaatgcggctaatccaaccccacagctactgcgtggaaaccaccacgtgggtagtcgtaatgagcaattgtgggacggaaccgactactttgggtgtccgtgtttcctgttttaccttacattgctcatggttacaacatatattaaatcgtatatgttgttcacc

SEQ ID NO: 424 - DNA, 590 bp, Human rhinovirus C23
  source 1..590: mol_type = genomic DNA; strain = RvC23/USA/2021/ULVLFU
actcttgccacccattgggtgtggtgctcttgtattacggtacacttgcatgccagttttatatcccccttccccacaatgtaacttagaagctaatcacacgaccaatagggggtggtaatccataccacttaaggtcaagcacttctgtttccccggtatgcgtggaataggcctctcaaggggctgagaccacaattatcgttacccgcatgtgaactatgcggaacttagtattgccttgaaagtacattgactggtcgctcagccaattcccatggtagacctggcagatgaggcaagaaataccccactggtgacagtgttcttgcctgcgtggctgcctgcacaccctccccgggtgtgaagccaatgtatagacagggtgagaagagtcgagtgtgcttcacatgagtcctccggcccctgaatgcggctaatccaaccccgcagctgtagtatgcaaaccagcatacatgcagtcgtaatgggtaactgcgggacggaaccgactactttgggtgtccgtgtttcctgtttttcctttactcatgcttatggtgacaatattgaatattgatattgtcact

SEQ ID NO: 425 - DNA, 560 bp, Human rhinovirus C30
  source 1..560: mol_type = genomic DNA; strain = USA/2015/CA-RGDS-1045
cggtacacttgcacgccagtttgcctccctttccctttcccttgccaaacccccttggaacttagaagcaatacattagaccaataggaggtaacgatccatgttacctaaggtcaagcacttctgtctccccggtatgcgtggaataaacagtgcaaacggttgaagccacaattatcgttatccgcgcacaaactacgcagagcctagtactaccctgaaagtctgtaggttggtcgatcagctaatccccatagtagacctggcagatgaggcaagacactccccactggcgacagtggtcttgcctgcgtggctgcctgcacaccctctggggtgtgaagcctactgacggacagggtgcgaagagccgagtgtgctttgtgtgagtcctccggcccctgaatgcggctaatccaaccccacagctgtggcatacaagccagtatgtacgcagtcgtaacgggtaactgtgggacggaaccgactactttgggtgtccgtgtttcctgtttttctttatatatatgcttatggtgacaatagtgaatattgttacc

SEQ ID NO: 426 - DNA, 498 bp, Human rhinovirus C31
  source 1..498: mol_type = genomic DNA; strain = RvC31/USA/2021/B8JUE1
aactggaccaataggtgataaccatccaggttatcaacggtcaagcacttctgtctccccggcataggggtgttaggcttctcacgaggctaaagccccgacagtcgttatccgcacaactactggacaaagcctagtaacaccctacgatgtagtatggttggtcgttccaccagtaaattccccctggtagacctggcagatggggctagaaattcctcactggcgacagtgttctagcccgcgtggctgcctgctccctaacgggagaagccatcctactgacaaggtgtgaagagccccgtacgctagttgtgagtcctccggcccctgaatgcggctaatccaaccctgcagccattgcatggaaaccaccatgtagatggtcgtaatgagcaattgcgggacggaaccgactactttgggtgtccgtgtttcttttgtttcttgtatattgcttatggtgacaatatatatatcacatatatattgttcatc

SEQ ID NO: 427 - DNA, 596 bp, Human rhinovirus C32
  source 1..596: mol_type = genomic DNA; strain = USA/CA/RGDS-2016-1008
atcccaccatgattgttcactgaacgttgtactcttgtattacggtacacttgtacgccagttttataatcccctccccttgtaacttagaagcaagtacacacaggccaatagcaagtagcaagccatgctacttatggtcaagcacttctgtttccccggtctgacgggatatgcttcacccgaggcagaaactcagatgatcgttatccgcaaagtgcctacgggaagcctagtagcaccctggaaactgttaggttggtcgctcaattgctgaccccgagcaatagacttggcagatgaggctagacataccccaccagcgatggtggtctagcctgcgtggctgcctacccaccctaatagggtgggaagcctatcaatggacagggtgtgaagagcctactgtgctcactttgactcctccggcccctgaatgtggctaatcctaaccccgtatctatcgcatgcgcaccagcatgtaggtagtcgtaatgggcaactacgggatggaaccaactactttgggtgtccgtgtttcctgttttctttattatttgcttatggtgacaattgtatgaaatacgattgacacc

SEQ ID NO: 428 - DNA, 596 bp, Human rhinovirus C34
  source 1..596: mol_type = genomic DNA; strain = RvC34/USA/2021/BYRST7
cgggcatactgtgcgtagtacactgtgattccggtcaccttgtacgcctgtttgctaccccaccccaactttctttcattcttcacttccagtaacttagaagttgacacagagtccaataggatgcagctaatccaagtctgctacggacaagcacttctgtttccccgggtgtgtgaatagactccaacagggttgaagctgtagcactcgttatccgcacaactactacgcgaatgttagtaacactctctaagtatagtgggatttcgctccgcagaaaccccatctgtagattagggcaatgaggctacacagaccccactggcgacagtggtgtagcctgcgtggtgccctacctggggtttcataccccaggattccactttactgacagggtgtgaaggcgctagtgtgctagttgtgagtcctccggtccctgaatgtggctaatcctaaccccgtggccatttcatgtaaaccaacatgcaggtggtcgtaacgagtaatcacgggatggaaccaactactttgggtaaccgtgtttcctgttttacttaatgtgtgtgtcttatggttacaattatagagtaacc

SEQ ID NO: 429 - DNA, 621 bp, Human rhinovirus C35
  source 1..621: mol_type = genomic DNA; strain = RvC35/USA/2021/70881
ttaaaacagctgtgtggttgttcccaccaccaggcacaccgtgcgttgtgcactggaatctcggttcctttgcacgcctgttttcccaccctcatgtttgtctgtctttgcatgtaacttagaagtatcacaaacagctcaacaggagtggctcaaccagagccattacgagcaagcacttctgtctccccggacgtgtgaataggccttaccaaggctgaagctgtagcgttcgttatccgctcacctactgcgcaaagactagtaactaactagatacttagtggtgtttcgctcagcagtaccccactgtagatcagggcaatgaggctacgcatcccccactggcgacagtggcgtagcctgcgtggtgccctgcccaggtttcgacctgggacaccgctatgttgacagggtgtgaagaccggcgtgcgctaggtgtgattcctccggcccctgaatgcggctaatcctaaccccgcagccaccacatgcaacccagcatgtagatggtcgtaatgagcaattgtgggatggaaccgactactttgggtgtccgtgtttcctgtttttctttattgttgtcctatggttacaaatttgtgtatcagatttgtgacc

SEQ ID NO: 430 - DNA, 547 bp, Human rhinovirus C36
  source 1..547: mol_type = genomic DNA; strain = RvC36/USA/2021/PEXCU4
gcctgttttccctcccccccccctcctttaatgtaacctagaagcttgaacaaacgcccaataggatatgaccactccatggtcgtaaagggcaagcacttctgtctccccgggtgtgtgagtaggctctaacagggctgaagctgtagcactcgttatccgcacatctactacgcagaggctagtaggaccatgtcaatcctttaggcgtttcgctcagcgtgtacccccacgtagatcagggcaatggggctacacattccccatcggcgacgatggtgtagcccgcgtggtgccccgcctaggcctacacggcctaggacgccaaaggaaagacagggtgtgaagacccgagtgtgctaggtgtgagtcctccggcccctgaatgtggctaatcctaaccccgtagccatggtgtacaagccagtacaaacatggtcgtaatgggcaactatgggatggaaccaactactttgggtgtccgtgtttctctttttacctttcactgcatttatggttacaagcttgtaaatacagacttgtaatc

SEQ ID NO: 431 - DNA, 547 bp, Human rhinovirus C39; identical to SEQ ID NO: 430
  source 1..547: mol_type = genomic DNA; strain = RvC39/USA/2021/71206

SEQ ID NO: 432 - DNA, 557 bp, Human rhinovirus C40; identical to SEQ ID NO: 415
  source 1..557: mol_type = genomic DNA; strain = RvC40/USA/2021/70389

SEQ ID NO: 433 - DNA, 609 bp, Human rhinovirus C41
  source 1..609: mol_type = genomic DNA; strain = USA/CA/2016-RGDS-1006
gttgttcccacccctaccacccatgtggtgtagtgctcttgtattacggtacacttgcacgccagtttgcctccccaccccctttccatttacacccaaccttatgtaacttagaagcagtacactggaccaataggtggtaacaatccatgttaccaaaggtcaagcacttctgtctccccggcatgcgtggaataaacagtgcaaacggttgagaccacaaatgtcgttacccgcgcatgaactacgcagagcctagtatctccctgaaagtccattggttggtcgttcagctaaaccccatagtagacctggcagatgaggcaagacgcaccccactggcgacagtggtcttgcctgcgtggctgcctgcacacccttcggggtgtgaagccaattgacagacagggtgtgaagagccgagtgtgcttcatgtgaatcctccggcccctgaatgcggctaatctaaccccgcagctgtggcacacaagccagtgtgtatgcagtcgtaacgggcaactgcgggacggaaccgactactttgggtgtccgtgtttccttttattcttttatcaagtacttatggtgacaataataaatattgttacc

SEQ ID NO: 434 - DNA, 547 bp, Human rhinovirus C42; identical to SEQ ID NO: 430
  source 1..547: mol_type = genomic DNA; strain = RvC42/USA/2021/278730

SEQ ID NO: 435 - DNA, 610 bp, Human rhinovirus C43
  source 1..610: mol_type = genomic DNA; strain = SC174
ttaaaactgaaccatagttgttcccactgtggttgcccaaggggcgtggtggtcttgtattacggtacatttccatgccagttttatcaccccttcccgaaacatagaagaaatgcacacaccgaccaataggaggtggtcaaccagaccactaaaggtcaagcacttctgtttccccggttggcttggatatgcttcacccgaggcaaaaaccgagccaatcgttatccgcaaagtgcctacgagaagcctagtagcacccttgaagccaatggttggtcgctccgttgcaaccccagcagcagacctggcagatgaggctgagcattccccaccagcgatggtggctcagcctgcgtggctgcctgcgcatccttcgggatgcgaagccagaaagtggacaaggtgtgaagagcctattgtgctcactttgagtcctccggcccctgaatgtggctaatcctaaccccgcagctactacacataagccaatgtgcaggtagtcgtaacgggcaactgtgggatggaaccaactactttgggtgtccgtgtttccttgttatctttttgaatgcctatggtgacaattgtacagtatacatttgttacc

SEQ ID NO: 436 - DNA, 608 bp, Human rhinovirus C47
  source 1..608: isolate = CA-RGDS-1001; mol_type = genomic DNA
ggcatgggttgtacccacccatgccacccaagtggtgtagtgctcctgtatcccggtacacttgcacgccagtttgccctcccttttccccaagtaacttagaagcttacacacaggccactaggaggtggtaatccataccactgatggtcaagcacttctgtctccccggcacgcatggaatagaccttgaaaagggttgaagccataaatgtcgttatccgcattggtactacacaaagcctagtaatgccttgaaacttctacggttggtcgttccgctagatgcacccctctagtagacctggcagatgaggcagggcaaaccccactggcgacagtggccctgcctgcgtggctgcctgcgcgcccacttgggtgcgaagccgatgaacagacaaggtgtgaagagccccgtgtgctaccaatgagtcctccggcccctgaatgcggctaatccaaccccacagctattgcacacaaaccagtgtgtatgtagtcgtaatgagtaattgtgggacggaaccgactactttgggtgtccgtgtttccttttattctttaaatttgcacatggtgacaatattggtagtatcagtattgtcatc

SEQ ID NO: 437 - DNA, 438 bp, Human rhinovirus C50
  source 1..438: mol_type = genomic DNA; strain = human/Australia/SG1/2008
ttccccggacgtgtgaataggctccaccaggggctgaagctgtagcgttcgttacccgcactgctactacgcaagggttagtatctaactgaaaacattgtggagtttcgctcagcagaaccccactgtagatcggggtaatggggctacacaacccccaccggcgacggtggtgtagcccgcgtggtgccccgcctgaggcttgtgcctcaggacgccacaatgttgacagggtgagaaggcctacgtgtgctagcagtgagtcctccggcctctgaatgcggctaatcctaaccccatagccatcacacacaatccagtgtgcaggtggtcgtaacgggtaactatgggatggaaccgactactttgagtgtccgtgtttcctattttacctttacatgtcttatggtcacaatatagtgtatacatattgtgatc

SEQ ID NO: 438 - DNA, 641 bp, Human rhinovirus C51
  source 1..641: isolate = LZ508; mol_type = genomic DNA
ttaaaacagccgtgtggttgtacccaccaccggacacactgtgtgttgtgcactggaatctcggttcctttgcatgcctgttttaaaccccccttcccccactctttctatcattcttttcttcctaatgtaacttagacgttataccacagtccaataggacgtggccaatccaggccatgacggacaagcacttctgtctccccgggcgtgtgaataggcctcaacaaggctgaagctgtagcgctcgttatccgcatttgtactacgcgatggctagtatcatccttctcttggtcttggcgtttcgctcagcgtggtaaccccccacgtagatcagggcaatgaggctgcatatgccccaccggcgacggtgatgcagcctgcgtggtgccccgcctgggttaacccccaggacgccacaatcaagacagggtgagaagacctgagtgtgctacagatgagtcctccggcccctgaatgcggctaatcctaaccctgcagctatcgtatgcaaaccagcatattggtagtcgtaacgagcaattgcgggacggaaccgactactttgggtgtccgtgtttctctttttatttgaaatgttgcttatggttacaagttttggtattaaacttgtgacc

SEQ ID NO: 439 - DNA, 607 bp, Human rhinovirus C54
  source 1..607: isolate = D3490; mol_type = genomic DNA
ttaaaacagctgtgtggttgttcccaccaccaggcacactgtgcgttgtacactgggattccggtcactttgtacgcctgtttgctatcccccccaacttatgtaatttagaagatgtacacaacgcccattaggatgcggccaaaccaggtccgcttagggcaagcacttctgtttccccgggtgtgtgaatagactctaacagggttgaagctgtagcactcgttatccgcgcaactactacgcgaatgttagtagcatcctgtgttgcatttgggatttcgctccgcagaaaaccccatctgtagattagggcaatgaggctacacataccccactggcgacagtggtgtagcctgcgtggtgccctacccaggccttcttggcctgggattccacttacaagacagggtgtgaaggcactagtgtgctagttgtgagtcctccggcccctgaatgcggctaatcttaaccccgtagcccccgcaagtaaaccaacttgtaggtggtcgtaatgagtaattacgggatggaaccgactactttgggtgtccgtgtttccttttattctttatatttgcatcctatggttacaacataagtaatc

SEQ ID NO: 440 - DNA, 603 bp, Human rhinovirus C56
  source 1..603: mol_type = genomic DNA; strain = RvC56/USA/2021/466615
cacccacaccgtctacggacgtagtactcttgtatctcggtacatttgtacgccagttttccctccctccccccccttcatgtaacttatagaagcttgaacatacaggcgaataggaagccaacaaaccatgttggtaaacgccaagcacttctgtttccccggtattagagtgttaggcttctcacgaggctgaagcttgatatatcgttacccacacagttactaagcagagcctagtaacactttgatctctatactggctggtcgctccgtcagaaaccccctgacagacctggcagatggggctggaaattccccactggtgacagtgttccagcccgcgtggctgcctgtcccccttccttgggggaaagccaatatatagacaaggtgccaagagccgcgtttgctaattgtgagtcctccggcccctgaatgcggctaatccaaccccacagctatcgcatggattccaccatgtaggtagtcgtaacgggcaactgtgggacggaaccgactactttgggtgtccgtgtttccttttataccttattttatctcatggtgacaacatatattgataagtatatgttgaccacc

SEQ ID NO: 441 - DNA, 810 bp, Enterovirus E
  source 1..810: isolate = HeN-A2; mol_type = genomic DNA
tttaaaacagcctgggggttgtacccacccccggggcccacgtggcgccagtactctggttcgattagaacctttgtacgcctgtttttccccacccttaaataaattaagatctctaccaatgtggggagtagcccgactccgcaccgatacgtcgcaccagcagaccggttcgcctaggacccttctgcggattggtatgagttcccacccctgcaacttagaagtcttcacaaaccgaccaatagcggcgttgcacccagcagcgcaacggtcaagcacttctgtttccccggcgcgttgcgtcgttacccgcccaatctactacgggaagcccagtatggtcccaattgattgcgcagttgcgttcggccacaaccccagtggtagctctgaggaatggggctcgcctttcccccacagcaatgtggtggcttgcccgcgtgtgtcctcgggttcactcaatgagtgttcactgcaatctcaagcaagacctgaagagcctactgtgctagactggttttcctccggagccgtgaatgctgctaatcccaacctccgagcgtgtgcgcacaaaccagtgttgctacgtcgtaacgcgtaagttggaggcggaacagactactttcggtactccgtgtttccttgttttatttaaattttttatggtgacactgactgatatttgtgagtttgctcgcttgcctttgaatattgccctatattacttgattgcattccataaaacaactcaactttcagtcgaacttattgactttgcagtgtttttgaatcgtgctcacaagaaat

SEQ ID NO: 442 - DNA, 821 bp, Enterovirus F
  source 1..821: isolate = HeN-B62; mol_type = genomic DNA
tttaaaacagcctgggggttgttcccacccccggggcccacgtggcgccagtactctggtacgctagtacctttgtacgcctgtttttccctcccttaaataaattaagattaccactactgaggggagtagtccgactccgctccagcactgctgcaccagtgagctggtacgctagtaccttcgcacggagtagatggtatccccaccccgcaacttagaagcaaagtacacaaccgaccaatagcggctcagcatccagctgtgcaacggtcaagcacttctgtttccccggtccgcaaggatcgttacccgcccatgctactacgagaagcctactaaccactgaatccatctagaggttgcgctcagccacaaacccagtggtagctctgagtgatggggctcgcatttcccccgtggtaacacggttgcttgcccgcgtgtgcactcgggttcgacctatggtcgttcacctcgaaatggtgtaggtggccaagagcctattgtgctagcgtggttttcctccggagccgtgaatgctgctaatcccaacctccgagcgtgtgcgcacaatccagtgttgctacgtcgtaacgcgtaagttggaggcggaacagactactttcggtactccgtgtttcctttattttatatttatattttatggtgacaattgctgagatttgtgatttagcgactttaccattgaacattgcattgtactaccttgtctcgtttcacaaagtctcagaaatacccagtgcatacattgatctacttgtcctcttgaatttaaaacataaattagagagtacaaa

SEQ ID NO: 443 - DNA, 797 bp, Enterovirus G
  source 1..797: mol_type = genomic DNA; strain = EV-G/Pig/JPN/Kana-Uchi13/2019/G1_PL-CP
gttgttcccacccacagggcccactgggcgccagtacactggtatgccagtaccttggtatcacggtaccattgtacgccagtacctttgtacgcctgttttatactccctcccccacatgtaaccttagaagtttaaataaacaaggaccaataggagtccaacacccagttggattgcggtcaagcacttctgtctccccggacctagtagtgataggctgtacccacggccgaagatgaacccgtccgttatccggccagctacttcgagaagcctagtaacatcaaagatctgtcttggcgtttcgctcagcgcgttccccccgcgtagatcgggctgatgggtctccgcataccccacgggcgaccgtggcggaggccgcgtggcggcccgcctatggcgaaagccataggacgccatttcagtgacagggtgtgaagagcctattgagctagttggtagtcctccggcccctgaatgcggctaatcctaaccacggagcgtccaccagcaaaccagctgggagggcgtcgtaacgggtaactctgtggcggaaccgactactttgggtgtccgtgtttccttttgatcctattttggctgcttatggtgacaacgataagttgttatcataaagcttttgggttggccacctggaaaaagttatcagtgtttgacattgttcggctctcacgcctaccaataaaacaagctttatatttgttaatttcattttatccatccaaggatattactgaatttcacttacaactcttgcttacactatcaacaag

SEQ ID NO: 444 - DNA, 847 bp, Enterovirus I Dromedary camel enterovirus
  source 1..847: mol_type = genomic DNA; strain = 19CC
ttaaaacagcctgggggttgttcccacccccagggcccacgtggcgcaagtactctgcttcgttagaagccttgtacgcctgttttcccctccttaaacaaattaagattgccacttccgaggggagtagtccgactccgctccgatacgtcgctccagtgcgctagtacgcttagtactttctcacggggatagtggtatccctccctagtaatttagaagacttgaaaaaccgaccaataggcacctcgcatccagcggggtaaaggtcaagcacttctgtttccccgggtcgagtagcgatagactgtgcccacggtcgaaggtgaaacaacccgttatccgactttgtacttcgggaagcctagtaccaccaaagattatgcttggggtttcgctcagcacgaccctggtgtagatcaggccgatggatcaccgcattcctcacaggcgactgtggcggtggtcgcgtggcagcctgccgatggggcaacccatcggacgccaagcatatgacagggtgtgaagagcctactgagctacaaagtattcctccggcccctgaatgcggctaatcccaaccacggagcatttgctaccaaaccaggtagtggaatgtcgtaacgggtaactctgtggcggaaccgactactttgggtgtccgtgtttccttttaatttatcattctgtatatggtgacaactatagtgctatctcgatttgcattactattgttgagattaaaactttattacattgttgcattttaccctttgagtgagttttcacctgaacagattaatttactcatcctgtttatatattacaagcagaaatacttgcaaag

SEQ ID NO: 445 - DNA, 747 bp, Bovine enterovirus
  source 1..747: mol_type = genomic DNA; strain = GX20-1
tgtacgcctgttttcccctccttaaataaattaagattaccactactgaggggagtagtccgactccgctccagcactgctgcaccagtgaattggtatgattagtacctcttcacggagtagatggtattcctaccccgcaacttagaagtttatcaacaaaccgaccaataggtgcacagtatccagctgtgtaacggtcaagcacttctgtttccccggtccgccaggatcgttacccgcccgacccactacgagaagcctagtaactagccaagtgaccgcgaagttgcgctcagccacaacccctgtggtagctctggaagatggggctcgcacttcccccgtggtaacacggttgcctgcccgcgtgtgcttctgggttcggccttgtgccgttcacttctacgtcatgtaactagccaagagcctattgtgctgggacggttttcctccggggccgtgaatgctgctaatcctaacctccgagcgtgtgcgcacaatccagtgttgctacgtcgtaacgcgtaagttggaggcggaacagactactttcggtaccccgtgtttccttttattactatattatttaatggtgacaattgcagaaatttgtgatttagcgactttgccattggacatagcattatattgtttaattgcttttcacaaaacgtctgatatacccaactcttatattgatctacttgtctttctttgcttgaagaataaattagagaaagcacg

SEQ ID NO: 446 - DNA, 819 bp, Goat enterovirus
  source 1..819: isolate = NMG-F37; mol_type = genomic DNA
ttttaaaacagcctgggggttgttcccacccccggggcccacgtggcgctagtgctctggttcgtctagaacccttgcacgcctgttttcccccccaaacaaattaagcttaccggtgctgaggggagtagtccgactccgctccactacggtgcaccagtagactggtaccgcggtacctttctacggagttgccggtatccctcacccgtaacttagaagtttgaacacgaaccgaccaacagcggctcggcagccagtcgggcaacggtcaagcacttctgtctccccggtccgcaaggatcgttacccgccccgactactacgggaagcttagtacctggccaagcttggaagaggttgcgttcggccacaaccccagtggtagctctgagtgatggggctcgcgacatcccccttggcgacaaggacgcttgcccgcgcgtgcactcgggtccaccttatggtgttcacctcgactaagcgtaactagagaagcgcctactgtgctagttgggttttcctccggggccgtgaatgctgctaatcccaacctccgagcgtgtgcgcacaatccagtgttgctacgtcgtaacgcgtaagttggaggcggaacagactactttcggtaccccgtgtttcctttattttattcattcaatttatggtgacaattgttgaaatttgtgatttagcgaaattaccacttaatttggcactatattacttggttgctttccacaagacctctgacatacccagttcttacattgatctgctagtttatctgaacttgcaacacaagttgaatcaagtaaa

SEQ ID NO: 447 - DNA, 1339 bp, Aimelvirus 1
  source 1..1339: mol_type = genomic DNA; strain = gpai001
gtagaaaccccctggccccctcttcaacgcagcgggtggtctgcgtaatctaccacccagtcgggaagagaccccgactctaacttcaagtctcaagcaacccaaccatcattgtaaccgggactgaacttccttcggtcttggtcgtgggactaacagagtttctgtttgagtttccggcccaggacttaaggttggaatgttccaagataagtttaagtacctcctggatctgcaaccgcgggactaacaggtgaaccctgtgagtttccggcccaggatttaggatgacatgttccaagtcagatgccaacgacttggtaaggacgaatttgcccgcactacgttacggttcccgcccgggacaactggtaccccattaggctacaacatggctgaaaagggtattgggtccccccggattgtgtccgttcgtagtgtgtgtaacgtggtttaccatctccactaacattggactaagcatttcatctttcctccccgattgtgtactcacttggctaacgctgggtggtcgcggttgggtccttgatttactttttctcgtctaagcattccgactgtcctccccgattatgtgctcattcagttaactgctgggtggtcatgactaacatcgaggaaccttctgtccacgcttactttgagctccggtcgcttgacgcttgtagggcgatagggttatcttcctgacaacatctttattctacctccataggctctatctatggagacggagtgtggcacccgtcccttctttgggagcttcggtagtgacgccctttgtcactctcgccagccgaggcatgcctggtgccaggtagcaaagaaagcatatgtttaaggacttgactgatttagcgcaagagtttgtagcgatgtccatagtgtctgcggattccccacacggcgacgtgtgccgcggaggccaaaagccacggtgttcacagcacccctatggatgcccacagaccccagtgggcactcttgttgccggactttcaggaaattaggcataggctcttctcaaactcctggcattggactaggtaagaatgccccggaggtaccccagtactccttcgggagtctgggatctgaccgggggccccacaaacatgctttacgtgtttcgtgcggtcaaaaattgtctaactagtcccaaccttgaacaagggattgttctttcctttttattactgagactggcctatggtgacaacagagattgactgtgaatacagttattttctggtgttcatcatttggtttttctccgtgctcttttacctttgtggtatttgttctttagataggcaaa

SEQ ID NO: 448 - DNA, 970 bp, Ampivirus A1
  source 1..970: mol_type = genomic DNA; strain = NEWT/2013/HUN
ttaaaatgaaaatgtgcgagcatttagctcgcacttttcattttaaatatgtccacagccctcaagggacttagtcccttgtccgcctcggcgacttaatatttaacttgtagttacttatataaagcccgtaatttatacgatacatacaaaactccagcatccactctgactgccatagtggaataaaccaagaccactctctacatccggagagtcaaatccattggacgaccatttgatactattctacaaaatctattttgatcatattatattaagcattaagcgtcattgacttggttgattaattagtttcactgattaatcgagtcaacaaacaacttcctaaattaatataattttgctcaaacgagaatttcagaatattatgcgaccatttaactatgtttacttaagcatcattgacttttgagtcaacaaataccttaagtttccgctcatctccttaccttcatacgcaggcccataagcctatattatttacctctatttataattttaatcattaatctgcacaattccaccgtttagacattattagggtttataacaacactaataattattgtatgaaaaccagtagttccagcgcgtcgtggcctattgacccccatacaaagttcataagaatagttttgctgttttcagtcattcattctttcccttaaaaggtttggtcacctataagtccagctcattacatcgagtatggcaagtctgcccaacatttgttatatctgactctggtgataataaatgtggcgggataaagttacaagtctagttatatagacagctttagctcaaaaccccaatttccccccttgtgtattattattgtattattaattgtaattatgtatttaatgtaaattgtacttttatctatccaacttcttatttcaattttctatcaagacttttttcttgtcgaaactcaatatct

SEQ ID NO: 449 - DNA, 918 bp, Equine rhinitis A virus
  source 1..918: mol_type = genomic DNA; strain = PERV-1
ttgaaagggggttgaatgtttgactgtgcagcagggaggccatgggtaccccacttttaggagatgaccaaacgcagtaaccgcaagcaattgcctgtagcgtcagtaaaacgcaatacacaagatttgagcctgtagcgtcagtaaaacgctgcaaccacaagctattgactgtagcgtcagtaaaacgcaaacattcttgtggcgctcgcgtagcgctcaagtgcagagcttcccggctttaagggttactgctcgtaatgagagcacatgacattttgccaagatttcctggcaattgtcacgggagagaggagcccgttctcgggcacttttctctcaaacaatgttggcgcgcctcggcgcgccccccctttttcagccccctgtcattgactggtcgaaggcgctcgcaataagactggtcgttgcttggcttttctattgtttcaggctttagcgcgcccttgcgcggcgggccgtcaagcccgtgtgctgtacagcaccaggtaaccggacagcggcttgctggattttcccggtgccattgctctggatggtgtcaccaagctggcagatgcggagtgaaccttacgaagcgacacacctgtggtagcgctgcccagaagggagcggagctcccccgccgcgaggcggtcctctctggccaaaagcccagcgttaatagcgccttctgggatgcaggaaccccacctgccaggtgtgaagtggactaagtggatctccaatttggcctgttctgaactacaccatctactgctgtgaagaatgtcctgaaggcaagctggttacagccctgatcaggagccccgctcgtgactctcgatcgacgcggggtcaaaaactgtctaagcagcagcagaaacgcgggagcgtttctttttcctcatttgtttc

SEQ ID NO: 450 - DNA, 1045 bp, Foot-and-mouth disease virus - type A
  source 1..1045: isolate = A/BR19-16_08dpi_CB-RF; mol_type = genomic DNA
tgaaagggggcgctagggtctcacccctagcgtgccaacgacagtccccgcgttgcactccacactcacgttgtgcgtgcgcggagctcgatggactatcgttcacccacctacagctggactcacggcaccgtgtggccacttggctggattgtgcggacgaacaccgcttgcgcttctcgcgtgaccggttagtactctcaccaccttccgcccacttggttgttagcgctgtcttgggcactcctgttgggggccgttcgacgctccgcgagtttccccgcacggcaactacggtgatggggccgtaccgcgcgggctgatcgcctggtgtgcttcggctgtcacccgaagcctacctttcaccccccccccccaagttttacgtcgttcccgacgtaaagggatgtaaccacaagcttactaccgcctttcccggcgttaaagggatgtaaccacaagacttaccttcacccggaagtaaaacggcaacttcacacagttttgcccgttttcatgagaaatgggacgtctgcgcacgaaacgcgccgtcgcttgaggaggacttgtacaaacacgatctaagcaggtttccccaactgacacaaaccgtgcaatttgaaactccgcctgggctttccaggtctagaggggtgacactttgtactgtgtttgactccacgttcgatccactggcgagtgttagtaacaacactgctgcttcgtagcggagcatgacggccgtgggaccccccccttggtaacaaggacccacggggccaaaagccacgtccgaatggacccgtcatgtgtgcaaacccagcacagtagctttgttgtgaaactcactttaaagtgacattgatactggtactcaagcactggtgacaggctaaggatgcccttcaggtaccccgaggtaacacgtgacactcgggatctgagaaggggaccggggcttctataaaagcgcccggtttaaaaagcttctatgtctgaataggtgaccggaggccggcacctttcttttaattacactggactt

SEQ ID NO: 451 - DNA, 1094 bp, Foot-and-mouth disease virus - type Asia 1
  source 1..1094: isolate = Mazbi/QOL-UVAS-Pak/2006; mol_type = genomic DNA
ttgaaagggggcgctagggtctcacccctagcacgccaacgactgctcctacgctgtgctacacacttacgtgtgtacatgcgggaaccgatggactatcgttcacccacctacagctggactcacggcaccgcgtggccatgctagctggattgtgcggacgaacgccgcttgcgcttcggcgtgaccggttaatactcttaccactctccgcctacttggtcgttagcgctgtcttgggcactcctgttgggggccgttcgacgctccacggtttcccccgtgtgacacactacggtgttgtggtcacaccgtgcgagtaggcccacccccctccccctttccccccccaatcctccccgggccccctccccccccccccaaagatttaccgtcgctcccgacgttaaagggagataaccacacgcttgagaccgtcttgtccgacgttaacggactggaaccacaagcttataccgcctttcccggcgttaacgggatgtaaccacaagatggaccttcacccggaagtaaaacggcacacacacacagttttgcccgttttcacgagaaacgggacgtctgcgcacgaaacgcgccgtcgcttgaggaggacttgtacaaacacgatctacgcaggtttcccaaccgacacaacccgtgaaacttgaaactccgcctggtctttccaggtctagaggggtgacattttgtactgtaattgactccacgctcggtccactagcgggtgttagtagctgtattgttgcttcgtagcggagcataatggccgtgggaactcccccttggtaacaaggacccacggggccgaaagccacgtcctaacggacccattatgtgtgcaaccccagcacggcaacttactgtgaaaaccactttaaggtgacactgatactggtactcaactactggtgacaggctaaggatgcccttcaggtaccccgaggtaacacgcgacactcgggatctgagaaggggaccgggacttctttaaaagtgcccggtttaaaaagcttctatgcctgaataggcgaccggaggccggcgcctttcttttgattactactgctatt

SEQ ID NO: 452 - DNA, 1091 bp, Foot-and-mouth disease virus - type C
  source 1..1091: isolate = KEN/1/2004; mol_type = genomic DNA
ttgaaagggggcgctagggtctcatccctagtacgccaacgacagctcctgcgttgcactccacacttacgtgtgtgtgcgcgcgggaaccgttggacttccgtccacccacctacagctggactcacggcaccgcgtggccatttcagctggattgtgcggacgaacaccgcttgcgcatctcgcgtgaccggttagtactcttaccaccttccgcctacttggtcgttagcgctgtcttgggcactcctgttcggggctgttcggcgctccacggtctcccccgcgcagcagactacggtgttggggccgcctcgtgcgagccgctcgcctggcgtgcttcggctgtcactcgaagcctgcctttcacccccccccccccaagtattaacgtcgggaacgacgttaaagggaggtaaccacaagctttgtaccgtctttcgacgttaaagggaagtaaccacaagcttgacaccgcataccccggcgttaaaggggatgaaaccacaagatacaccttcacccggaagtaaaacggcacattcgcttacttttgcccgttttgagaaatgggacgtcagcgcacgaaacgcgccgtcgcttgaggaagacttgtacaaacacgatctacgcaggtccccccaactgacacaaaccgtgcaacttgaaactccgcctggtctttccaggtctagaggagtgacactttgtactgtgcttgactccacgctcggtccactagcgagtgttagtaacagtactgttgtttcgtagcggagcatggtggccgtgggaacccctccttggtgacaaggacccacggggccgaaagccacgtcctgacggacctaccatgtgtgcaaccccagcacaacaaccttactgtgaaaaccactttaaagtgacactgatactggtactcaaccactggtgataggctaaggatgcccttcaggtaccccgaggcaacacgcgacactcgggatctgagaaggggactgggacttctttaaaagtgcccggtttaaaaagcttctatgcctgaataggcgaccggaggccggcgccttttcccttattaacactacttt

SEQ ID NO: 453 - DNA, 1094 bp, Foot-and-mouth disease virus O
  source 1..1094: isolate = o6pirbright iso58; mol_type = genomic DNA
ttgaaagggggcgctagggtttcacccctagcacgccaacgacagtccctgcgttgcactccacacttacgttcgcgtgcacgcgggacccgatggactttcgttcacccacctacggttggactcacggcaccgcgtggccattttagctggaccgtgtggacgaacaccgcttgcgcttctcgcgtgaccggctagtactctgaccactctccgcctacttggtcgctgcgctgtcttgggcactcctattggggtcgttcgacgctccacgggctcccccgtgcggcgggctacggtgatggggccgtttcgcgcgggctgatcgcctggtctgcttcggctgtcacccgaagcccgcctttcacccccccccccctaagttttaccgtcgtttccgacgtaaaggggaagtaaccacaagcttgacaccgcctgtcccggcgttaaagggaagtaaccacaagcttacaaccgcctaccccggtgttaatgggatgtaaccacaagatacaccttcacccggaagtaaaacggcaaattcacacagttttgcccgtttttcatgagaaacgggacgtctgcgcacgaaacgcgccgtcgcttgaggaggacttgtacaaacacgatctaaacaggtttccccaactgacatacaccgtgcaatttgaaactccgcctggtctttccaggtctagaggggtaacactttgtactgtgcttgactccacgctcggtccactggcgagtgttagtaacagcactggtgcttcgtagcggagcatggtggccgtgggaactcctccttggtaacaaggacccacggggccgaaagccacgtcctgacggacccaccatgtgtgcaaccccagcacggcaacttttctgtgaaactcactctaaggtgacactgatactggtattcaagtactggtgacaggctaaggatgcccttcaggtaccccgaggtaacacgcgacactcgggatctgagaaggggactggggcttctgtaaaagcgcccagtttaaaaagcttctatgcctggataggtgaccggaggccggcgcctttccattataactactgacttt

SEQ ID NO: 454 - DNA, 1010 bp, Foot-and-mouth disease virus - type SAT 1
  source 1..1010: isolate = TAN/3/80; mol_type = genomic DNA
ttgaaagggggcactagggcgagaccctagtgtcgcgtaacgaccgtccccggttgaaacgctactgctcagacctctggctgtcgcacctctattaggcaggcaggaaccacccttttggggcctacgtactctcgcccttttgggacccgcggtcgtcatcaccgcgcctccattaggctgatagtcgtacctcctctaggctgacaactgtcgcccttttagggcctgtgaccttcaagttacggctttagcgtccctcccgcggccgactcgcctacgtgaacgctagctcgtcacccgacggcctacctttcaccccccccccccctaaagaacgttttccgtcttttccgacgttaaaggattgcaaccaaacgcttcttaccgtcttttccgacgttaaaggattgtaaccataagatacaccttcctgcaggaagtaaaacatgcacaaagtaatcagttttgcccgttttcatgagaaacgggacgtcagcgcacgaaacgcgccgttgctctttgcattcttgtacaaacacgatctagacgcaggaatctcagaccaactcaccccgtgcaactgcaagtttcgcccggcctttccgggtctagagagacaaacagacgcactgaagccaactccacgattggtttactagcgggtattagtaacactcactttgcttcgtagcggagcacatgagcggtgggaatccccccatggtaacatggacccaccgggccaaaagccacgcctcgtgcctcatgtgtgtgcaaccccagcacggcaatttgtttgcgaaacctactttaaggtaacactgagactggtacttgacttctggagacaggctaaggatgtccttcaggtaccccaaggtaacacgagacacttgggatctgagaaggagaccaggagttctttaaaactgcctggtttaaaaagcttctatgcctgaataggtgaccggaggccggcaccttttcctttaccacaactctatttt

SEQ ID NO: 455 - DNA, 626 bp, Duck hepatitis A virus 1
  source 1..626: mol_type = genomic DNA; strain = R85952
tttgaaagcgggtgcatgcatggccattttccagcacaggttcagctggtatggcatgcgtgcatcgactgcttgggggtgtccctgacccccttaattcaacgtctagcccacgatacgggcaccctatccaatttgtgtccctttacctcccatggattgacttgtatggatttggatctaaattggattaccctttgtttgtggtggttagccaaccatgctctggtgtaatggttccatgtgttcatctggctaagtgccgacctaggaggtggtgctgaaatattgcaagccactagcgttgttacacttggcctctggatacgtgggattaattgcattctgtacagaggaaggctagtctatgccttgggctaatggtcttcgttgtgaaacggattaccggtagtagcatcttagactaccaaggttgtaggtgagtgtgtggtctagagtaggcacacatctgtccaggcacatgtacattgttacgattgctccagactagttcctgagggacagatgttgtggggggcttgggaaaacccccttaacctacactgcctgatagggtcgcggctggtcgagtcccacacactataataccagtagactttcatgca

SEQ ID NO: 456 - DNA, 609 bp, Turkey avisivirus
  source 1..609: isolate = USA-IN1; mol_type = genomic DNA
ttgaaagcgaatgtatggccgcatttccacactagtaactagtagtggtatgcggctgtgcattcgctttccccccctctttataggggcggtctttgtatctttactaatttcctacttttctatcatctctttttaaggtagggactaaggtctcctagcccttccccccctgggctttccaggatcaagggggttctaaagctaggccatgtttcctgagcctcatttagtacggagagttagtagtcataaaacatgccagtaaccttctagtgcccaagggtgacagagtggtaacactctccttggggcccgaaaggctagtgggcatagttgttaccaaggaaggggtccccaccccaacctgaactaacagctagaagctcaccttagaagaagtgctggatcccaacatgtcttataatgaaagctcaatggaaaggtgaggagatggaagcatgggggttcactgagtagatgccctgaaggagaaatctgatcaggggcccgtgactatacattaggtaaaccgggtataaaaaccatgaaaggtgacccacaaattttcctttatttttatgttttgttggtgtgaattcaggcaag

SEQ ID NO: 457 - DNA, 803 bp, Bopivirus sp.
  source 1..803: mol_type = genomic DNA; strain = bovine/TV-9682/2019-HUN
ctttccccccctccctccccccgacgggcaactgcaacttggccccggcgagcgggtaggtcgcactccggtggatgctagaatgatcagcaggttgcctctcttgatatcggggctcacttcggtggactcttgatgtttagagatgtcaaagaggatgtcgcagtgtggcattctctaagcatgcttgtttccatctttgcatatccacgtggttggtgtggattctagttcagctcccccgcttggggtcgcttgggctgaacaccaacccatggttgcagaacggacagcagcgatgtcagtgacgtttgagggacgattttgggttccggctttgccgggctaacgtgccagtggatcaatacatggtaacatgtacccctggggccgaaagccaagtgttcgcagcacccgttagcgacttcggtcgacccatcttcgcgattcacaccgaactgactagtggctggtatcgcttctccaaccatgacgttgggctaaggatgccctgcaggtacccaattggatctgagcaggggccccatccgtggcgctttacaccatggcttggggttaaaaaacgtctaacccaacacgccagagggatctggtttcacttttattttattaactctttctacactggtgacaagttaatgataaacgttgtgcgcctgcagaactattgacttgacttgttatcacggtttctacacagttcaatactccactttttgtcttaggtgtttgtcatttctttgatttttcagttccaatcagcacccacttaacttttcaca

SEQ ID NO: 458 - DNA, 576 bp, Encephalomyocarditis virus
  source 1..576: mol_type = genomic DNA; strain = ZM12/14
tccccccctttctcttccccttccttaatttaactggccgaaaccacttgggataaggccggtgtgtgtttgtctatatgtcacttctaccacaccactgtcttttggtggtgtgggggcccagaacctggccctgtcttcttgacgagcactcctaggggtctttcccctcttgccaaaggagtgtaaggtctgttggatgtcgcgaaggaagcaatctctctgtaagcttctggaagacaagcaacgtctgtagcgaccctttgcaggcagcggatttccccacctggtaacaggtgcctctgcggccaaaagccacgtgtataacatacacctgcaaaggcggcacaaccccagtgccacgttgtgagttggatagtcgtggaaagagtttgatggctttcctcaaacgtatccagcaaaagggctgaaggatgcccagaaggtaccccattttatgggatctgatctggggccacggtgcacgtgctttacacgtgtcgagccggggttaaaaaacgtctaagcccttaagtcacggggacgtggctttccctgttaaattaacactgaaac

SEQ ID NO: 459 - DNA, 955 bp, Human TMEV-like cardiovirus
  source 1..955: mol_type = genomic DNA; note = Accession: NC_010810
acctgcgacagtgccaacccacatctcttcccactattattattccggttcccgccttaggtccattgaaaagaccaaacatgtcatcccttggatgctggctaatcagaggaaagtcagcattttccggcccaggctaagagaaacatataagttagaaatgattctaatcccttgacgaattcggaacgagaagttctccctcccttgccgcttgttcacacccatcatttaattcggccctttgtgacaagcccctcggtgaaaggacctctctctttccgacgtggttggaattaacatcttttccgacgaaagtgctattatgcctccccgattgtgtgatgctttctgccctgctgggcggagcgtcctcgggttgagaaaccttgaatcttttcctttggagccttggctcccccggtctaagccgcttggaatatgacagggttattttccaaactctttatttctactttcatgggttctatccatgaaaagggtatgtgttgccccttccttctttggagaatctgcgcggcggtctttccgtctctcaacaggcgtggatgcaacatgccggaaacggtgaagaaaacagttttctgtggaaatttagagtggacatcgaaacagctgtagcgacctcacagtagcagcggattcccctcttggcgacaagagcctctgcggccaaaagccccgtggataagatccactgctgtgagcggtgcaaccccagcaccctggttcgatggccattctctatggaaccagaaaatggttttctcaagccctccggtagagaagccaagaatgtcctgaaggtaccccgcgcgcgggatctgatcaggagaccaattggcagtgctttacgctgccactttggtttaaaaactgtcacagcttctccaaaccaagtggtcttggttttccaattttgttgactgacaat

SEQ ID NO: 460 - DNA, 772 bp, Saffold virus 3
  source 1..772: mol_type = genomic DNA; strain = NGT07-987
ttcaaaacttgatgttctccctcccttgctgcttgatcacacccacctctaaaattcggccttttgtgacaagccccctggtgaaaggacctctcttgtttcgacgtggttggaattaacatcaattccgacgaaagtgctatcatgcctccccgattatgtgatgttttctgccctgctgggcggagcaccctcgggttgagataccttgactcttttcttttggaaccttggttcccccggtctaagccgcttggaatacgacagggttattttctatactcttacttctacttttacgggctctatccgtaaaaagggtatgtgttgccccttccatcttcggagaatccacacggcggtctttccgtctctcgaaaagtgtggatgcaacatgccggaaacggtgaagaaagcagttttctgtggaaatttagaatggacatcgaaacagctgtagcgacctcacagtagcagcggactcccctcttggtaacaagagcctctgcggccaaaagccccgtggataagatccactgctgtgagcggtgcaaccccagcaccctggttcgatggctattctctatggaaccagagaatggttttctcaagccctccggtagagaagccaagaatgtcctgaaggtaccccgcgtgcgggatctgatcaggagaccgaatggtaatgctttacattatcactttggtttaaaaattgtcacagcttctccaaaccaagtggtcttggttttccttttatccacatggcaag

SEQ ID NO: 461 - DNA, 1258 bp, Human cosavirus A
  source 1..1258: mol_type = genomic DNA; strain = AM326/BRA-AM/2017
ggtcctaccgcgccgctcaggcgcggattgtgtcttccatacacacctttccgtgtagcgcacgtaaactgctaggcccgtaataggccgactggctttgccagtggtctctcccaggagaccaaaacccaactcacttacgagttacttatttatcttgaaactacataaagaacgtgtaccgctctttgtttctttaaggaaattagagtagaaaacatttgaaattgggctcggttgaactccgggcgctttccatccgctgtgatgggctcactcctgtacaccgtgagtccgcgcagtgctgacttaacacttaagtaatgcataggccgagaattacaccgctcggctcccacctttttccatcgtgggattaacaggtttaatgcacaaattcctgtccttggctatgtcaaagcaatacagtgtgtactcggtgtacacgctcaaggcggagatttaggcctcacagattgtgttttgtgttgttgaatgctggatggtcacgttggagactgcatgtggcagtcttgaaacgtgtggtttgacgtctatccattacggcagtgggtggagtactgcaaagatgtcaccgtgctttacacggtttttgaaccccacaccggctgtttggcgcttgcaggacagcaggtttattttcttatattctctatttctagccaacagggtactatcttgttgggcggagtgatactcccgttccttcttggacagattgcctccacgttctttgtggatcttgaggtgatcaagtcactggtaagtagagcgaaggttgaggagacctgaggaatttccatgtggctttgccaggagttgtagcgatgctgtgtgtgtgtgcggatctcccctcatggtaacatgagcctcacaggccaaaagccctgtccgaaaggacccacacagtggagcaatcccagctccctcctacaaagctttgtgagaatgaactcacgtttattcttctttattctctacttacatcaggccccaaagatgtcctgaaggtaccttgtgtatctgggcacgagcaccatcaactacccggacttgtgcttcggcgcagacgcatgtggtgactcagcccctctgcttcggcagaggggctttttgctcgctcagcacgagatctgatcaggagcccctcccagtgtgctttacacctggcgaggggttaaaaattgcccaaggcctggcaaaacaacctaggggactaggttttcctttattaaca

SEQ ID NO: 462 - DNA, 1247 bp, Cosavirus F
  source 1..1247: mol_type = genomic DNA; strain = NGR_2017_NHP_CV
ggctgctggcacctttccgtgtagcgcacgttagcgtaggcccgtaataggctgcatcaccttcttggtggtgtgctcggaagagcaaaacttttctttaaccctttaaaaacctttttactctagtaactcgttaagactttctagaacccactactacaagatcccatctgctcaggatgttggtctttgttccaactagtagtgagaaatttgaataagctttgctgacaaaagaactagaggtcggtgtgatgggctcactcctgtacatcgtgagtatgctcaaccactgactaaagggctgcttgaacttaacatcatggattccgatccgttacattgatcggcccgtgcccttctcaatatgggattaacagagcttcaacttggttttcctgtcttttagcgttccaacggtattatgccacaacatggcagaaagcccgcggtagctatcacagattgtgtaaccaggtttggctgctggatggtcatattcagatcgcatgcatgtgtggtcttgagatatgtcccggttgacgtttcccttatgttacattcttgacagccggtggagtgctgaaattacgtcaccatgctttacatggtttttgaactccacgccggtcgctagacgcttgtaaggcgataggcttatcttcctatttctcttctttctagcccagtaggttctatctactggggcggagcgaggttcccgttccttcttggacagctggtcaccacaccttgtggattcttagactggcaaaacactggtgcaagagttgaagggattatgtgtttaagtgaagttctactgctttttgaggaatcgtagcggtgctgtgtgtgtgtgcggattccctcctgcggcgacgcaggcctcacaggccaaaagccacggtcgaaagaccccacacagtggagatatcccatctccttcctctcttagtagtttaatgaatctttttcacaggatcttataagactactgcatttcagaccccaaagatggcctgaaggtaccttgtgtattcactttggctgaaccaccgactccccggactggctttgccgacgcatgtgggtgcccagcccctgcccttaagggcaggggcttccctcagcaagtgacacgagatctgatcaggtgccaggtcactggtgctttacaccaccctggttaaaaattgcccaaggtctgacaccccaacccaggggactgggttttcttttatctt

SEQ ID NO: 463 - DNA, 982 bp, Canine picodicistrovirus
  source 1..982: mol_type = genomic DNA; strain = 209
agttatggctatgcctttgtgcatatgctcgatgtctctcccttttatgaccttttcccgaccaacatctcatgtcggattaaactggatgatcttttaagactccctaacccagaattcctccggggtactcctgtggatctagcttatactggattcccgcccggcgttgttcgatctgaacggcgttagtttcacctgtggtagcctctgcggagggcccacggcgtttagtggttctgcctaaggacaaccacctaacctacccatgtctctatcgtccctactagttttaggcagtattgtacgctctttatacaaatctgtcaaccctttgtataactctaagccgaacaattatagctaggctttttattatataacattaattaggcattagcgttgtcgccaatctcttggtaatcctaaggatacctttcctgttgactaagatgaagcgccttcggttaccgatgcccggtgtccacgaagccatcgtggtcggccgcgtcccccacctctcccaacttggactccatgttttcagtaggtgtaatgattagtattattgattctgctcgttcaatgtgtttatcttcacgatctgggacccaacacatgcttcactcatgtttaaatgttggttccctcattttgaagacacccaaaccatagagtgcgagaatgaggatttctacttccattctggtaacagaaatgaattcctgcgtgtgtctcgtaaatggaatctttaagaacttcagataaatcgaacaatacactaatacaagttgttttctaccaacatgttcaatgcggctaatctgaccgtggagctgtgaagcgctcaaacccgagtgttgtatacagtcgtaatgcgtaagtccatgaggaaccgactactgttacctctgttggtgtgtttctcctttattctcttttattattatttgttattgcaaatactacaactttgatcaac

SEQ ID NO: 464 - DNA, 894 bp, Equine rhinitis B virus 1
  source 1..894: mol_type = genomic DNA
ttttgtaactgaggttttgacatctcattgtttttgagccccaacgtcttggtggatgctcaaagaagattactcttgatgcttggctctcagaaagaatggcacctcaatgttttgagacccgattcttttgagtcgagaccatttccccttccctgaagattgcttttcttccaactaaacccctattgatgtgttggtcgtttgccaatcggagggcgacaggcacaggtcgctccgagttctagtagtgtgggaacttgttactactgatgaaacgaggtagtgacactcagtacctgcgaacgaggtcggggccctcccttcttccttcacccaactttcacttttcgttccactttagcaggggtcttctttctatccccctggcggcattggaactagccgtcgcgtcttaacgcgcagccctgaaggccccacaccttgtggatcttgccgtgggtatgtttctggcatgtgtttctcaagcctgcaaccgaagccgaacagccacatgaacagtttgagcgtggtagcgctgtgtgagttggcggtggatccccctcgtggtaacacgagcccccgtggccaaaagcccagtgtttacagcacctctcacatccaggacgaccccatcctggcgctcactcttagtagtatggcttagtacgcattaggtggtaagccgagctctccctcggccttgttctgaatgcacacatgtctaggggctaaggatgtcctacaggtacccgcacgtaaccttcagagagtgcggatctgagtaggagaccgtggtgcactgctttacagatgcagcccggtttaaaaagcgtctatgcccctacagggtagcggtgggccgcgccctttccttttaaaactacttgttct

SEQ ID NO: 465 - DNA, 669 bp, Simian hepatitis A virus
  source 1..669: mol_type = genomic DNA
cttgatacctcaccgccgtttgcctaggctataggcttcttccctacacccttgtttgtcttttttttttttttttgtgtgtttgtaaatattaattcctgcaggttcagggttcttaatttgttctgctatacagacactcttttcacgctttctgtcatcttatttcctgggctctccccttgcccaaggctctggccgttgcgcccggcggggtcaactccatggttagcatggagctgtaggagtctaaattggggacgcagatgctaggaacgtcgccctgcagtgttaacctggctttcatgaagctctttgatcttctacaagaggtaggctacgggtgaaacctcttagattaatactcctatggagagatatcttgaatagggtaacagcggtggatattggtgagttcctttgggacaaaaaccattcaacaccggaggactgactctcattcagtagttgcattgagtgaattgtctgtcagggctgtctttgggtttaattcctggcctctctgtgcttagggcaaaccatttcctggccttaaatggagttctgtgagagggaactcctcctttatatgctggacatattttggggccttagggttatggtttgcctctgaggtactcaggggcatttaggtttttcctcatttat

SEQ ID NO: 466 - DNA, 708 bp, Hepatovirus D2
  source 1..708: isolate = KS111230Crimig2011; mol_type = genomic DNA
ttcaaaagagggtggggagttttctccccacccccttttggatacccatggtgcgggggtataaattaccgcaccccctttgctgtgcccagggtatgggcacctttctgtctgttttgtttcgtttgtctgctttatgtgtgctcgtcccctatagggcactcatttcagctttctttcattctttcttttccccggttctcaccttaccggaggcactggccgttgcgcccggcggggtcaacctagtgattagcactaggctgtaggtgtctaaagtggtgacacaaagaggtgtttcctgattccagcactgttaactgatacagatgaaacctgattgatcttctagaaggggtaggctacgggtgaaaccccttatcttaatactactatgtagagatagatccagtaggttaagggcagtggataaggttgagttcaaatggacaataaatcttcaacactggtggacccaatctcactggctagttgccttcagtgtggattctgtggaggggtgtttcttctggatagggaaccatcacactggtgcctgagactcagggtgtctggccttaaatcacagaagccgtatggtttttgtggcctagcttctgcctctaaacagactctggggcccaatgacaccctgagcccttcggggtactcaggggcatttaggttttccacatttcaaaatagtca

SEQ ID NO: 467 - DNA, 711 bp, Rodent hepatovirus
  source 1..711: isolate = KEF121Sigmas2012; mol_type = genomic DNA
ttcaaagggtggctgggattttgtcccagcctccctttggagttccttggctctggggaactaaattaccaggcccgcgtttacctagcgcttaggttaaaacccccatcccttatttgtaaatattgatttctgcaggttcagagtttcttaatcatgttccctttaggacactcactccacttgctttcattcttgtttccgtggttctcccatcaccacaagcactgaccattgcgcccggtggggttaaccatatgattagcatatggctgtaggtgtttaagggtgggacaataatggaaggtcaaatagcaggcttgtttaacttccttttgtttcatctcatgtatctttctgaaggggtaggctacgggtgaaaccccttaggttaatactcatattgagagatacctgtggtaggttaattgccctggataaacttgagttgttagacaataaagtttcaacaggggtggacaagatctcaccaccagactggcatgttgtgggacatctgggaggcaagtttcttcctgtgatgttggcctttacatattgcctgggtgttaagaaggagcccttaaattcacttttctgtgagcctagcttccgctggacggactttgggggcagcatccttcttgatgcttctggggtactcaggggcatttaggtttttccacattataaatatatagatgaatagag

SEQ ID NO: 468 - DNA, 424 bp, Hepatovirus G2
  source 1..424: isolate = FO1AF48Rhilan2010; mol_type = genomic DNA
gtcttcttttatccgggctcacgtgatgccaatggtccgacccatgcgcccgtgggggttaacacatggattagccatgtgctgtaggccctaaaagtcacgttcacgtaaggcttggatgaaactcatgtctgttaactgagggtggtaagttacattgatcttctaaagagggtaggctacgggtgaaaccctctaggttagtactcatattgagagatacctccagtaggtgaaggtttccggatattggtgagtttaacgacaataaccattcaacggatgtgggcccacctcactggttagatgccttgtaatccaacacccaaggggatatgagtgaattcttagtcccaagtgaccctcccgaaaggttgtaggggtactcaggggcatttaggttttccacatttaaagtgaattg

SEQ ID NO: 469 - DNA, 683 bp, Loch Leven virus
  source 1..683: isolate = MW12_1o; mol_type = genomic DNA
gttgacgcgcaggagcctttggacccaagccctggattgggctcgttttggcggttttcgttaaaactgtcctagtctcatacgagctagtcaatatcgtatgcgtaggcggagcgttatgccgccaatttgtttccttttcccttttataaccccatcttttcccaaccctagtgtgtgagttttaatagctcttgctgcttttaaatctttgcttgctttgttggtcggtagataggagtttcctctttatatatatgtatctatattcccggctgtctccatgcctagagctgctaccgctgcgcccggcggggttaactccacgattagcgtggagctgtggccgccaaaagtggagatgcagtgactaattgtgtttgttagttccatgacttgggggaggagcgtatggcgttcgatcggtccaaatgaggtaggctacgggtgaaacctcatggctcttctaaatactatgtatgatggggttgtggtacgctaacctagacggataaaggtgagatgctcgtcgtcaaaaacctttcaacgtctggccgggggcgtcacacttggagcgcgaacgacccagcaaaccaaactttcttgttgtggagccttctaacacataagctgtaccctatgcgtttagggctactcaggggcatgttaggttttaggccaag

SEQ ID NO: 470 - DNA, 601 bp, Hunnivirus 05VZ
  source 1..601: isolate = 05VZ-75-RAT099; mol_type = genomic DNA
agctttcctacccttcatttgtgaacccactagtccaagccgcttggaatacgatgagtggaaatgttcattctaaatggagtgaaacatgcttaattttctagtccatgctggtctttccagtgtggagcggccctgtctggccgtaattctccagagcgtcacgccatacttgtggacctcacgtgccgcatgacagcgctgcagctggaactgggtgcgcggtgcccatagagtaacagcgaaaagtgttagatcaagctttgcttgggctatgagcctgcggaataacaactggtaacagttgcctcaggggccgaaagccacggtgttaacagcaccctcatagtttgatccaccccagggtggtgatgtttaacagttagtagttgccaatctgtgttcactgaaatctcggcataccgtgcagtgtacaggggtgaaggatgcccagaaggtacccgtaggtaaccttaagagactatggatctgatctggggccttgtccggagtgctttacacacggctcaaggttaaaaaacgtctagccccacagagcccgagggattcgggttttcccttaaaaacccgactagagctt

SEQ ID NO: 471 - DNA, 642 bp, Melegrivirus A
  source 1..642: mol_type = genomic DNA; note = Accession: NC_023858
ttcccgaccggtctggcaaaccggacggttatcctggttagatgtctgatggttgctggaacgtggtggctattgctgccatcttctggctgcctttattgggcattctagctgggttctttgccaaaattcccatcttattcttattcccattttccttacccaggcttatttacaactggtaagttgacccactggttttgttcttggacttctctggtgttggtggacactctttccacaagtaagtattgtggagttcatgctcgttctgaaccgggaatggcacaacccgtagtaggatcttgcctctgccacatttacttgcgcctgttgcttctagactatgggctgctaaggatgaccgcagacccctttttgggcaatctgtgtcaagtctactgcttcgtctggtgtacgctggaaatccctgttctggatgcctatgcttggaggtggtgctgaaatattgcaagccacaagcatacctctggactcggtgccgctaccaggtgttgcaccccttgtgggcaaacgtagaaccttggtggacgcgtgagatgggaatccacgcctggccatagactggctgataagctcgcggctgatcgagttgcaacagtaatcagttgatttgccact

SEQ ID NO: 472 - DNA, 668 bp, Canine picornavirus
  source 1..668: mol_type = genomic DNA
ttatttttcaaaatgccactggcattacaccatattcgtatggtgtaatgtcagtggttggatgcccagtcctgagggactgtgcatccagtggttaagagccacactctttatttatcaactattgatctttgtaactaagaaatgtaccagagttctattatggctccaaacccattggggtctagaacaagcacttctgttaccccggtcattattggctgttaggatgtacccacgtctgaaggccaagaagatcgttacccggctgttgtctacgggaagactagtaacttttgttgaaaggtaatctcattgatccgggtggcaaccccagtcacccagaaactagtgatgagtgtccacattcctcctatggtaacatagggtggtcgctgcgctggcactagggccttaaggcatgagagaaccaagacacaactgtgaagatccgactgtgcacttcagtattcctccggcccctgaatgcggctaatcctaacccacttgcacacgctcgcaacccagtgagtggtgtgtcgtaatgcgcaagaagtggacggaaccgactactttgggtgtccgtgtttctttttttatttaccaagtctcttatggtcacaagcattagaaacaagatgcctgtgatcactcgcgagacctccaac

SEQ ID NO: 473 - DNA, 646 bp, Turdivirus 3
  source 1..646: mol_type = genomic DNA
gaaagggggcccggcggggcaacacccgtcggtccctctttccgtccaagccgcggacgttaaactgtggcacggttgtgcctaggtgcaaccctgctactaatggcggtacccctgcccttagtatgcatgtttgtatgaatggaatctgtagtgatgccctgctttggggtctctaaaacacactacagtgatggctagagctcctctactccggctaccttagtagtgagcattggaagtatattgtgaacagggttccacgcccgataaaggctggtattcccgctcatggagtggacctaggtaactagggccatgagtgtgtgtgaatcagcacccgcaagggatagcagtatatggaaggtgctcgtgaaacggcaagtggagttagtagcagctctcagtctcaaggtcagcttctagacatgtgccgcaggtaccccgtaagggatctgagcggtagctaattagtccctggaggttggctgactttcttcctatttctcttttcactgcgaattgtgtggattggtattctttagagcttgggagttgtctcatattgaattcatatattttactctatactacactcaaacacggctctctggtcagttaagaaaatcatttatagaataataaa

SEQ ID NO: 474 - DNA, 415 bp, Pasivirus A3
  source 1..415: mol_type = genomic DNA; strain = swine/Zsana1/2013/HUN
tcctcacccatgcttttcctacccccaccacgcccgcatgtttactgctttccttgatgctgcccgtgactacttccatgacctccccaacccaaacctcaaacgccttaagctatcatgggctctctatcaccaatccccttccttcccacccagaacccccccctccctcccctacaacgtgtatgagcaagacgagtttgacaagctcgccgaagccatgctcacccactctcccttccccacatcccattacctcttccaccccctcccgtccaacgcccgcaccatcgtcgagcgtgaggctgactgggatggctgtgatctagaaaagaaatggctcgacctcgtcatagaggacgatgccaagttccttctggagaacggctctctcccgtttggctccacccttgcc

SEQ ID NO: 475 - DNA, 807 bp, Passerivirus sp.
  source 1..807: mol_type = genomic DNA; strain = waxbill/DB01/HUN/2014
ttgaaagccccacctggggggctttccctgtgctgcgacctgtcgctaaccaagaggcatgacctcaagattggacccacagtcgccacaggtgtccgttgatacgctccggacctaacccggataatgtaacatcaaattatttaagatttatgagcttatatactgttatgaacaccagtaaacatgttagattaagagcaaaacacccccctcgtcaattctagaagtccgcgagggatttagggtagcaaactaggaatctagatgcatattcttgttttaaaacccacgctgcaagtgatctgttcactctcatccaccctcagggtggtcagtgtggtgagtcatagcgacacctaacagaggctaacctagtaactcttgtgaagttcaacacgctgacaggattccacgtccgtttactgctagcattcccgctcagagggtggcccaagtaattggtgctctgagtgtgcgtgagctagtatcccgcgagggataggtgtgttgtaatgacacaagttggtgaaaggtaaagtgctttaggctagctactggcccattggctacgagtagacatgtgcaggaggtacccgctcatcttagcggatgtgacctgtagctaattagtcaatgctcgctgtagaaatcttttccccttttttcttttatatacagagtgattcgcatttgtattgaagattgtgtgcctagtgtatcttggtattatcagaggaagcaatttaaactggattttcaattaggaggattaaaaccttgttaactttttataagcattataaa

SEQ ID NO: 476 - DNA, 746 bp, Wenling sharpspine skate picornavirus
  source 1..746: mol_type = genomic DNA; strain = DHBYCGS18742
tccgttataggattatttggacctctatattgattgacgagaggttaaacaatgtgcgtttgcttcatgatttattatgttgtgatcgttggtcttcttaacacattgatgtcaatcacccttttactttactttgtaactaagtttcatacatttctttgaaattctcatttacaatattgtcgagctgattcacatgtttcatttacttttactacaaatctaaatgttccacaatcatattttgtttattcataatcaaggttgtaagtattatgcagggcaacccacgcagtcaattggtcactcatgaagtggctgtggattaacgcctgaatgtatttgcttattaatatcttgttttacgaatagataaattatgtggtctttttaaactacccttgttgttaattgggtcgaatcatcgcacacataatgctattttagacaaacgttgttcgcgagtatgcacggtattggaccattattgcttgtcattagcaccattggtaacaatgatgacaatccccggttttcacttaagacagctccgcgcttcgtgctgtgtttgagccttgagtgttgacgtctgggatgggtggttgtgctccactttatctagactgtgtatataagttagcaagctgttgctttcttagcattatgtggtgggcccgaccacaaagggcggtgggatgtgccaccgtaaataatcatatcaaaaccctttattttaatatgtagac

SEQ ID NO: 477 - DNA, 667 bp, Picornaviridae sp.
  source 1..667: isolate = rodent/RL/PicoV/FJ2015; mol_type = genomic DNA
gggtttctctgccctgtgctttggacgcccgccatggcgttaaactggcaatccccccttttccctacccgtaactaagtttttcctcggtcctttaggctgctaagacgcttgttgctacagcatattggaaccaccgagtcctccataagtaatcatttccacctctttgggtgtctatgcccttagagacggtttggagccccgttgactatgtcagagtgtgtcggtagcaggctttctgctctggacccatgccggccacacctcccagtagtgttgtgaaggaagtaagggattagtgaaaagattaggaatgttgccttggaatgtagcgattactgtaggtgagcggacttccccgggtggtaacacccgcctctcaggccaaaagccacggtgttaacagcacccctacagtaggccactaccccgtggtctccaagaatacagacctcttcttagtaactatccccctagctttcctgaagcatgctgctgtaaaggctaaggatgccctgaaggtacccgcaggtaacgttaagacactgtggatctgatcaggggcttgagtactgaagctttacagaagtagctcaagttaaaaaacgtctatgcctttcccccacgggagtgggggttcccccacacaatttcaacaggcact

SEQ ID NO: 478 - DNA, 425 bp, Avian sapelovirus
  source 1..425: mol_type = genomic DNA
cccccccccataccttttccccctctttaacggcaatggttaatggactaaggataaaggattatggacttatatgatgtgcccgacatggaattcgggaaatctggatctaagggttacctcaaaggtagtgaaattccctcgcaggggtatagtagctagctttgtgccttagtgaagggaccgtgtgttctagacatggtagttgtgtaggtacaagaggacttcatttgaatatcctcgatcccggacctaaattaccttgtggatttccggaggaatttaggaaaccacctccttcgggaggctagtaggagcttacatgactctcggattgggaagtccgagctggaccatgactgggtgatagcctgccggctggcgcagttcacatggtatagtcagttgaaaataaatagaaaatc

SEQ ID NO: 479 - DNA, 679 bp, Marmot sapelovirus 2
  source 1..679: mol_type = genomic DNA; strain = HT6
gggaaatacggggggggattacccccctcccgtatttccccctgttgcccgggggtagtgaacgatggatctacggatcctttgttcacagggccaaggttcaagcccacttttgtgagaagcatgctttactaggctatgggttgagtggcccataggcaaccctatgaagaggctacactcactacatccgccaacaggcccaggcgtatgtgggcctataagaaatgtacgttcgtccgcttatggtgcctaatccataggcatctaggacaagtacttctgtttccccggtcacgaggaatatgctgtacccacggcagaagccagacatgatcgttacccgactccgaactgtgcgaaacctagtaccttcaagtgaaacagagatcattgatccggggtgaccctgaccccagaaactcatgatgggtgtcgccgttccgacaggggagaccctgggcgtcgccgcgctggcatgagggcccattagggcatgatcaatgcggaccttgaggcgaagagtctagtgcgcttcggtttattcctccaggcccctgaatgcggctaatcctaaccccggagcgtatcacaccaatccaggtgctggtgcgtcgtaatgcgtaagtctgggatggaaccgactactttgggtgtcctgtgtttctaatttctcttg

SEQ ID NO: 480 - DNA, 867 bp, Bat picornavirus
  source 1..867: isolate = BtPV/13585-58/M.dau/DK/2014; mol_type = genomic DNA
attttgtactcctcaatcacacgaaaggcgtgggatcaaagaacgacgggttgacgtcgctacatacttgaaaaattgcaacaaactctgtcgataggcacactgtgttatatgctactttagtaatgatcttagatggaatgctctcttctttttgtaatttattgcaactggaatgatctttcttatttgaccccagactgatttagtaggcgacctttgtgtggagctaccccaaaaccctcttatatgtattattttatgttattgtacgtaccactcattattagactataaacgtcgtgagtaaaaatcaaaaacagtgaaatgttctacatatgcggattattggagcgacaatttgactagttgactaaagtaccttgtgagataacttacataattctttttaatgtgttaagtattaccagttggcctaagcccccaacaaataaattaacatgttgaactgatggtaagcctcgcttgtggaaacagtagcttttgttttgaccattgttcgagaaatcctcttagggacctccctaagaccgtgcaacagacaggtaacaacggactagagaattcacctctaggctacctgtaagcacgttcaatggtataaacataagtgcaaaagactaacagatttgtttcaatttttcaagtatgtagcgacgtcaacccgtcgttctttgatcccacgcctttcgtgtgattgaggagtacaaaataggttgggttggtcaccaaagacccattaccagtaaggaatactgtgttgacggcaaccaaaaaggttgtggctgcttgtactaaagctgaccgtttgaaagtaaacaccccccccccctgcttataccctat

SEQ ID NO: 481 - DNA, 526 bp, Bat picornavirus LMA6
  source 1..526: isolate = DesRot/Peru/LMA6_F_DrPicoV; mol_type = genomic DNA
acggttgcgcaagatggaattgcgaccactactgtggctttctctgacttggatagttaaccctgtaccgctgggtgaaaagggcccctcgcgttgcatatgtgagcaaggaggtactaaataacttcttgtttgcatgtgtgaacgcgagggatcacccttttcaccctgcggtacagggttaactatccaagtcagagaaagccacagtagtggtcgcaattccatcttgcgcaaccgtaaagctttagtgtaaaactgggcgccgaactggatctcgacaatccatagtaggagtgcagcctcttacacgaaaaccgaaggagagacgagtgcacaccaagtgtagtaattccatgagtacatggagccccagacacgtggtacgcgtagcctacgtggtgtcgttgggggtgggcatgccctctacaactggtgaccggagcgggggacgccgaggttttatgcacacgacctgatagggtgtgggccgacactctctcccgtattcggctgtacataagcc

SEQ ID NO: 482 - DNA, 939 bp, Sicinivirus A1
  source 1..939: isolate = JSY; mol_type = genomic DNA
ggggggctttccgggtggggtggatcctgtcgcgtgccttccgccgcacagtgtccacccctcctgctacccgctctgagtagcggtaccccccattccctccctttccccccacatggctggagcggcccacttgccttcgggctcgtgtgccaaccccaacccggggtcgtggcggacgtcatggctccggccatgacatcctaaccactccttaaacccaccttattttattttgaaatttaagtttaaattccccctaacccaaaggccttggcccatgtccttctaaggttagatggcatggacactctttgttcagcgtccgtcgacccactgggctaccactttttcactctaaacacaactccttttagtaaccaccctggctttgtcgtggttctgctcctgcagcacacgagtgcccaaggatcacggctggtaacagttgccttggggcccgaaaggctaggtggcaagggtgtggtcaagtgaggggttcccaccccgagccgactccacattcctgaagccacccttcgtgtggtaggccaatggcttcgatcgcgaccttgtcagtgtgttgaaacgagctagaagtgtttagaagttggattagttggtttgtggtgattagtagaccccctggaggtacccaatcttggatctgaccagggacccgtgactataccgttccggtaattcgggtttaaaataatgaacgtcaccacccaatttactctctctactattcattttcctaataccactactcacggatgattgtggaggttcttctggttgttattgtcttggctattgtcatttcctcgcctaacgaactcacccagctattggctatttgcatttacaattttgtcctgatctttttgtggttgtttggtattctagaactccccaactaccccacagttcggc

SEQ ID NO: 483 - DNA, 370 bp, Sicinivirus A5
  source 1..370: mol_type = genomic DNA; strain = RS/BR/2015/1
cccgattgctgtcctgcttgtctggtgaactcggctggaagcattcagtttctggatttgctggtttgtggtgattagtagaccccctggaggtacccgtctggatctgaccagggacccgtgactataccgttccggtaattcgggtttaaaactatgaacgtcaccacccattttgttttgtttggttgggctggattgtttgtttagatgctcctagaatccctgttggtgattgtagcacttgttgtagtggtcgtctctcctagtgaattaccccagctgtttgctatttgcatctacaactttgtcttgatttttctctggttatttggtaccttagagctccccaattatcccaccattcatc

SEQ ID NO: 484 - DNA, 949 bp, Sicinivirus sp.
  source 1..949: isolate = Environment/NLD/2019/VE_7_picorna_3; mol_type = genomic DNA
ggctcatgtcctttgaggtaagacgacatagacaccctttgtctagcgttcttcgagccactgagccaccacttcttcgctccaaacccgactccttttagtaaccgcattcccttccctatccccccatacagccggaacggaccactcacctccgggtttgtggcccaaccccgacttggggttgtggcggtggtcacagctccggctgtgacttcctaaccactccttacacccacccgttgcatttgctaacttaagttttctatccccatccctaaggccttggctcatgtcctttgaggtaagacgacatagacaccctttgtctagcgttcttcgagccactgagccaccacttcttcgctccaaacccgactccttttagtaaccgtactgacattattgttgttctgcctacgcagcatgcgagtgcccaaggatcacgattggtgacaatcgccttggggcccgaaaggctaggtggtaaggatgtggtcaagtgaggggcccccgccccgagccgactccgcactcccgaagccacccttcgcatggtggatgatttcccgattgcaattatgccagtgcgttgaaacaagctagaagtgtttggaagtcgaattagctggtttgtggtgattagtagaccccctggaggtacccattttggatctgaccagggacccgtgactataccgatccggtaatccgggtttaaaacaatgaacgtcaccacccaattactttcctaatttcttaactttaatgttgttaactggtgttcagatgcttttagagattttccttgttgtcttggcgctaattattgtgattgtgacacctggcgaactatctcaattccttgctatttgtgtctacaattttattttgattttcttttggctatttggattattcgaactccctgattaccccaccatccaac

SEQ ID NO: 485 - DNA, 331 bp, Porcine teschovirus 10
  source 1..331: mol_type = genomic DNA; strain = Vir 460/88
actagacttcggtctcttgttgtgtttaaacacagaaatcttgctacttggttatgaattcattggatcaacccctctgaaagacctgctctggtgcgagcaaaagcgcaattgtcaccaggtattgcaccaatggtggcgacagggtacagaagagcaagtactcctgactgggtaatgggactgcattgcatatccctaggcacctattgagatttctctggggcccaccagcgtggagttcctgtacgggaatgcaggactggacttgtgctgcctgacagggtcgcggctggccgtctgtactttgtatagtcagttgaaactcacc

SEQ ID NO: 486 - DNA, 493 bp, Tremovirus A
  source 1..493: isolate = GDs29; mol_type = genomic DNA
tttgaaagaggcctccggggaatccggaggttctctttcgacccaacccatactggggggtgtgtggggccgtatttggagtgcacggtatatatgcattcccgcatggcaagggcgtgccaccttgccccttgacgcatggtatgtgtcatcatttgccttggttaaaccccataaaacgaggcgccacgtgccgaaaatccctttgcgtttcacagaaccatcctaaccatgggtgtagtatgggaatcgtgtatgggggtgattaggatctctcgtagagggataggtgtgtcattcaaatccagggagtactctggctctgacattgggacatttgatgtaaccggacctggttcagtatccgggttgtcctgtattgttacggtgtatccgtcttgacacactgaaagggtattcttgggtaatcccttcctactgcctgatagggcggcgtgcccggccacgagagattaagggtagcaatttaaac

SEQ ID NO: 487 - DNA, 991 bp, Yili teratoscincus roborowskii picornavirus 1
  source 1..991: mol_type = genomic DNA; strain = LPWC175499
ccggggggaatccccggtaatccacttttcggccagcgtctgttgctggcactctcgcccaatcttataacactaggtattgggtcttacccgaaaggagaatcccactacaatagattataatgataaagagatagatcgacggttgcgggtcttaccttaaccgggaatcccaaaacaagcgtctatactccagagagagatcaaataagcagcgtaatggtgatacgttaaacaatccgtcatgagaagacgtaaaaatccttgtactgcaagtaaaattgcaacttttgtaattaagtaaatatgtacctcacacatgtgagcactctctaacatcagagaggaaataatcttaaattgtaatacgtgttctggtgaaccgtttagaaaccacgtccgactagagagactagtccacggagaaatccagatgttcaagttcactacgctttcctgcggaaacaatggttagctgagatttgaacgggcgtttaagttctagacacctcacagtggagcgatccacaacagagctacaatcttcagggctaactctggtgcgccgaggcatagcggcaactgtgtattaggagcatttcagggcttgaagagcaggcacgtgcttaaaatgtagcaaaactcaagatgttgagcaatgcgttctgtttgaaaaccatgagtacatggtaacctaccacattgacctatagtgcataacgagtgaagatgtagtttgaaaacatgcagcggatcatggaattgatcgcggtgtttcagatgaaattttcattgcagtgaacattatagagggctcgtttttcgataaccctttgtcagataatgttggaggtgggtacacccacttacagaaggtaccgttttcgtgtgggttgcgaaaatggcgttattagttaacacctaataatgttgtgcagggtgacagcctgtcggcgggtgcacatcttgttttaatccgttgtcttgccat

SEQ ID NO: 488 - DNA, 712 bp, Canine kobuvirus (US-PC0082)
  source 1..712: mol_type = genomic DNA
tcacgcacttttccggtggtccggacccagaccaccgtcactccattcagcttcttcggaacctgttcggaggaattaaatgggcacccactcacccttcccctcttctcgtaactaagtgtgtgcccaatctcttgactcctactggctccaccgaccggtagtgtccaaaatgctaggtggacttcctcccttcccttctgggcatcttgcccagcttcctccccccagcctgacgtgtcacaggctgtgcaaagaccccgcgaaagctgccaaaagtggcaattgtgggtcccccctttgtcaaggcgtcgagtctttctcccttaaggctagtcccatcagtgaattctgatgggcaactagtgacgccactgcatgcctccgacctcggccgcggagtgctgccccccaagtcgtgcccctgaccacaagttgtgctgtctggcaaacattgtctgtgagaatgttccgctgtggctgccaagcctggtaacaggctgccccagtgtgcgtagttctcatccagacttcggtctggcaacttgttgttaagacacggcgtaaggggcgtgtgccaacgcccaggaacgagtgtccactctaataccccgaggaatgctacgcaggtacccctggtccaccagggatctgagcgtaggctaactgtctaagggtattttcatttcccactctctctttctcgttcata

SEQ ID NO: 489 - DNA, 646 bp, Feline kobuvirus
  source 1..646: mol_type = genomic DNA; strain = FK-13
ggaattaaacgggcacccactcacccccatccccccctgtaacttaaagtgtgtgctcgtgaccttgactcctgcgggcttcaccgacccgtccagtgaacaaactgctaggtgactccttccccccccctggcctggatggcccacatccaggtcttcttcccccagcccgacatgtcatgggctgtttggaatccccgcgaaagctgctaacgtggcaattgtgggtcccccttccaacaagacaccgagtctttctcccttaaggctagccccgtgtggtgaattccaccgggcaactagtggtgtcaatgcatgcctccgacctcggccgcggagtgctgccccccaagttgcgaaactgaccaagactgtgctgcctggcaagcatagtctgaggagatgttccgctgtggttgccaaacctggtaacaggtgccccagtgtgcgtagtctccttccggttcgtccggctgtcctttggtaaagacacaatgtaaggggcgtgtgccaacgccctggaaagagtgaacttctactgccctaggaatgccacgcaggtacccctggtttcccaccagggatctgagcgtgggctaattgtctaacgggtagtttcatttccctcctctcttttgttgacatc

SEQ ID NO: 490 - DNA, 647 bp, Feline kobuvirus
  source 1..647: mol_type = genomic DNA; strain = WHJ-1
ggaattaaacgggcacccactcatccctacctccccctgtaacttgaagtgtgtgctcgtgaccttgactcctgcgggcttcaccgacccgtccagtgaacaaactgctaggtgatttcttccccttcccccacctggatgttctacatccaggtcttcctcccccagcccgacatgtcatgggctgtttggaacccccgcgaaagctgctaacgtggcaattgtgggtcccccttccaacaagacaccgagtctttctcccttaaggctagccccgtgtggtgaattccaccgggcaactagtggtgtcaatgcatgcctccgacctcggccgcggagtgctgccccccaagttgtgaaactgaccaaggattgtgctgcctggcaagcatagtctgaggagatgttccgctgtggctgccaaacctggtaacaggtgccccagtgcgcgtagtctccttccggttcgtccggctgtcctctggtaaagacacaatgtaaggggtgtgtgccaacgccctggaaagagtgaacttctactgccctaggaatgccacgcaggtacccctggtcccccaccagggatctgagcgtgggctaattgtctaacgggtagtttcatttctctcctctcctttgttgacatc

SEQ ID NO: 491 - DNA, 561 bp, Kobuvirus (dog/AN211D/USA/2009)
  source 1..561: mol_type = genomic DNA
ccgaccagtagtgtccgaaatgctagagtggacttcctcccttcccctctgggtatcttgcccagtttcctccccccaacctgacgtgccacaggctgtgaaaacaccccgcgaaagctgccaaaagtgggaattgtgggtccccccctttgccaaggagtcgagtctttctcccttaaggctagccccatcagtgaattctgttgggcaactagtgacgccactgcatgcctccgacctcggccgcggagtgctgccccccaagtcgtgcccctgaccacaagttgtgctgtctggcaaacattgtctgtgagaatgttccgctgtggctgccaagcctggtaacaggctgccccagtgtgcgtagttctcatccagacttcggtctggcaacttgctgttaagacacggcgtaaggggcgtgtgccaacgccctggaacgagtgtccactctaataccccgaggaatgctacgtaggtacccctggttcgccagggatctgagcgtaggctaattgtctaagggtattttcatttcccactctctctttcttgttcata

SEQ ID NO: 492 - DNA, 579 bp, Murine kobuvirus 1
  source 1..579: isolate = MKV1/NYC/2014/M014/0146; mol_type = genomic DNA
gccaggtcgcatcgcctggttggtgaccaaactgctagatgctcctccctttccctcggggttggcgcaccgccatccctgcatcctccccccagcctgacatgctacaggctgtgcaagaaccccgcgaaagctgccaccgtggcaattgtgggtccccctcttgtcaaggcacagagtctttctcccttaaggctagacccctctgtgaattcagaggcggcaactagttgtgccactacatgcctcagacctcggtcgcggagtgctgttccccaaaccctgacactgccgcgtgagtatgctgcttggcaagcattgcctggatggtcgttccgctggggctgccaggtctggtaacagaccgctccagtgtgcgtagaccatctccagcttcggctggtgctcacaaggtaagactcggtgtaaggttcatgtgccaacaccctggaatgagtgaaaactctactgccctaggaatgctacgcaggtacccctgctcccttgggagccagggatctgagcgtaggctaattgtctgtcgggtagtttcatttcccaccctctagactgttcacc

SEQ ID NO: 493 - DNA, 180 bp, Kobuvirus sewage Kathmandu
  source 1..180: isolate = KoV-SewKTM; mol_type = genomic DNA
tccggcggagcgtcctcagacaaaactggcacagttgtctcatcaggcaaccgcgttggctcccgcttcaccaaatggtgggagccagctgctgcgcgcgccctcgagcgcgcgaccgatgccaccatcgatggcatcgaaggtgctggtaaggtcgccaccaaggcgatctccaaaaag

SEQ ID NO: 494 - DNA, 770 bp, Bovine kobuvirus
  source 1..770: mol_type = genomic DNA; strain = IL35164
cacccacttttccggcggcgcacgttcgcgtcgtcgtaagtctggactcccaaggccaactcggttcaacttcggtttccggacaaatacaagaacctcagtcctcttggtactttctcgcctgagtcaacaaagcgagaaacctgcccctctaacgccagacgagcggcatgaaacttgaacttctggcatgttccactttccctctccctcaccccaccccaccgcgctctcaaggtcgcgctcttccgggactagcccggttttaaaagttcctggcaccctttgcccctctaggcccttaaggtaggaactgaccttgtgctgtgatctcggtgcggaagtgctactgcgtagtgattgtaagatccctttgtggttctgccctggcaaggctacagagtactgtgatccgctgcggacgccatcctggtaacaggacccccagtgtgcgcaacagtatgtccacggtcttccgtgttcaccacattcggaacactgctctcgtgaaacagtgtgtgtccaatccctgtgaccagtattaaccacaccacctaggaatgctaggaaggtaccccggttcgccgggatctgatcctaggctaattgtctacagtggtgctccttttattttcccctcacttcattgactacaactgcttgatttccgtgtttgctgctcttcttagctctcactgccattctcaagtgttcacactgtccaagctcctttggttgtttgcctccacttgccactgtcaactcttgtc

SEQ ID NO: 495 - DNA, 471 bp, Kobuvirus cattle/Kagoshima-1-22-KoV/2014/JPN
  source 1..471: mol_type = genomic DNA; strain = Kagoshima-1-22-KoV/2014/JPN
catccccaatatgttcggtgaggaatgctaccacgtaactattagtgaacccattgactgttctgccctggcaaggctatagagtacagtgttccgctgtggatgccgtcctggtaacaggatccccagtgtgtgtagctgtatgttcaacttcggttgttcacagtccttggtctagcttttagtgaaatggtgtgcgccatatccctacatttgggtgccacctctcaacccctaggaatgctaggaaggtaccccaccctccggtgggatctgatcctaggctaattgtctatggggttgtttccttttcttttcaccactcattactggctcacagattgtttgttgtgttccctgctctctctagctcccaacacggcacacagtctcagccacaccgcctttgcaaacgactaccagatttgtttctttgactcctctgattctcacatcttcactgaaccagac

SEQ ID NO: 496 - DNA, 665 bp, Caprine kobuvirus
  source 1..665: isolate = MN1/2018; mol_type = genomic DNA
gcccgtccccctcaccctcttttccggtggccacgcccgggccaccgatacttcccttcactccctcgggactgttggggaggaacacaacagggctcccctgtatttcctcttcccattccccctttcctaaccccaaccgccgtatctggtggcggtaagacacacgggtctttccctctaaagcacaattgtgtgtgtgtcccaggtcctcctgcgttcggtgcgggagtgctcccacccaactgttgtaagcctgtccaacgtgtcgtcctggcaagactatgacgtcgcatgttccgctgtggatgccgaccgggtaaccggttccccagtgtgtgtagtgcgatcttccaggttctcctggttggcgttgtccagaaactgcttcgggtaagtggggtgtgcccaatccctacaagggttgattctttcaccaccttaggaatgctccggaggtaccccagcaacagctgggatctgaccggaggctaattgtctacgggtggtgtttccattttctttttcacacaacttcattgctgacaactcactgactaatcacttgctctcttgtgcctttctgctctggttcaagttccttgattgtttgtttgattgcttttcactgctttcttcccacaatccttgctcagttcaaagtc

SEQ ID NO: 497 - DNA, 473 bp, Ferret kobuvirus
  source 1..473: isolate = MpKoV38; mol_type = genomic DNA
ccatggtgtacatcggtttccgggcaaatacaagaaccccagttttcctggcaattccttgactgggttaaagaaataaggaaccagcccctctaacgccagacgagcggctttaaacttgaacttctggcacacttttctccactacccttttccccaaactcggactgactcactggattttgaccactccccctttgtctgaccactcttttggatctccctccaacatgccggtggtgcctggcggaaaaagcacaagttgtgtgagcaacacccccacaggtcccacggaacggtctgtgcccgcagatctagtacgtgcggatccctggttgcttccactgctcgcctgtgagtagagtaggtgctgggtgtgatgcgtcttcggacgcctcgggcatagcattgctcccccgagaatcaagccatcgagatttctctggcctctgaagtcacgcctggacgcgtag

SEQ ID NO: 498 - DNA, 641 bp, Grey squirrel kobuvirus
  source 1..641: isolate = UK 2010; mol_type = genomic DNA
ggatttaggccgtggtgcccgtgggcacgacggccacggctccagccgcactcctctccacgccttgtcccacgggacataaagtggagccctaagccctaaacccccatgttacccaattttcttatccacttccctttttccctttgactcacatttttcttgaccgcgcttgtgaggcggttcccgtacagttgagttgacgggtcccgcgcgggacctgaaaattactccatactgattaggaaaggttctagtacgcttgtacccttaaggccagcgggctacctcctttaggtcttatagccccaactggttagaaccactccagctcacctctatcggtgcgggagtgctaccacccctgcctgcgtcaagcccgtttttctagtgatctgtccacaaacacttggattcccgtcgcgactgacagaacctggcgacaggtgtctcgatgtgtgtgaccaagtggcatgagaatcggaaactaacgctggtaagatggtaagtgcccaatccctgtggggtgatgtttttctctgcataggaatgctgcgaaggtaccccggccttgagtcgggatctgatcgcaggctaattgtcctctgtgcagttcatttccttttcttttcattggcatc

SEQ ID NO: 499 - DNA, 737 bp, Marmot kobuvirus
  source 1..737: mol_type = genomic DNA; strain = HT9
ggggcttcggccctcacaccctcttttccgatggtctggtcccggaccaccgtcactccattcagcttcttcggaacctgttcggaggaattaaacgggcaccccacttcccccccccaccctcgcaacttcaagtgtgtgtgcccataaccttgacccctgccggtatgccgcccggttcagtggacaaactgctaggcaaattcccccctccccctgtggctggtccttcaaccagccactctcttccccccagccggacgtgctacaggctgtgcaaagcccccgcgaaagctgctcacgtggcaattgtgggtcccccctttgtcaaggcttcgagtctttctcccttaaggctagtcccgtactgtgaaatcagtgtgggcaactagtgaagccactgcacgctcccgaccacggacgcggagtgctgtcccccaagtcatgacactaacaccaagctgtgctgcctggcaagcatagcctgggaaggtgttccgctgtggctgccaaacctggtaacaggtgccccagtgtgtgtaaccttcctccagtcttcggactggcagctttgtgtgaagacgtgacgtaaggttcaagtgccaactccctggaagggatgacccctctactgccctaggaatgctacgcaggtacccctggttcgccagggatctgagcgtaggctaattgtctacgggtagtttcatttcccacctttttatttctttagcatc

SEQ ID NO: 500 - DNA, 792 bp, Ovine kobuvirus
  source 1..792: isolate = SKoV-China/SWUN/AB18/2019; mol_type = genomic DNA
gggtggggggggggggggataccctcccccctcacatcccttttcgacggcgcgcctcggcaaggccgccgataccgacttgtgctacctcggtaccacatttcgggaataataatatgcccggtgtatgtttgcttgtttctcgcaccgtaccgacttcgggaatcagaaactagcacccccttccatcccacccttttcctctacccctataatttacaacgctgtgcacagcagcggccgccaaggactagcctggcggttataaaaggaatctgggtctttccctctctaagccataaggtagattccctgtgcccctgaatgctcggtgaggaatgctgcgtcgtaacgctttgtgaagtgactcttggttctggcttggcaagcctacagagtaccgtgttccgctgcggatgccatcctggtaacaggacccccagtgtgtgtagcggtatgttcgggcttcggtccgttcaccaagtttcatggaccactgcgcgaaagcgcgtgcgccatatccctgtacttcaggtgtctttttctgggaccccaggaatgctgcgaaggtaccccacttcggtgggatctgatcgcaggctaattgtctacgggttcagtttcctttttctttcctcctccatcattgactacctgattgattctagttcctgtgctttgcctgctccctctgctctcaacacggctttttcaaccagttctcgcacttcgaccaacaccatttacaccctcactttctttgactcatctgactcttggctcactgaaagc

SEQ ID NO: 501 - DNA, 668 bp, Human parechovirus type 1 (PicoBank/HPeV1/a virus p123)
  source 1..668: mol_type = genomic DNA
taccccgacttgctgagcttctctaggagagtccctttcccagccttgaggcggctggtcaataaaagcctcaattgtaacaaacatctaagattattacattaaccccatgcctggtctccactagttgaaggcaacttgcaataaaatgagtggaaacaagacgcttaaagtatggtgtaaattaacatttctaactcacattttgtgtggggtggcagatggcgtgccataattctattagtgagataccatgcttgtggaccttatgctcacacagccatcctctagtaagtttgtaagacgtctggtgacgtgtgggaacttattggaaacaacattttgctgtaaagcatcctattgccagcggaataacacctggtaacaggtgcctctggggccaaaagccaaggtttaacaaaccctttaggattggttctaaacctgagatgttgtggaagatacttagtacctaccgatctggtagtagtgcaaacactagttgtaaggcccacgaaggatgcccagaaggtacccataggtaacaagtgacactatggatctgatctggggccaggtacctctatcttggtgacctggttaaaaaacgtctagtgggccaaacccgggggggaaccccggtttccttttattttgtcagtgccact

SEQ ID NO: 502 - DNA, 642 bp, Human parechovirus 3
  source 1..642: mol_type = genomic DNA; strain = CAU14/2015/KR
ttctctaggagattccttttcccagccagaggtggctggttaaataatacctattgtaacaaaacatgtaagacacaacaaccgcacacctggtctccactggccgaaggcaactagcaataaggcaggtgggttcagacgcttaaagtgtgttgtgcatattcttttctaacctgtgttctacacagggtggcagatggcgtgccataaccctaatagtgagatatccacgcttgtggatcttatgctcacacagccatcctctagtaagtttgtaagacatctgatgacgtgtgggaacttgttggagataacattttgctgcaaagcatcccattgccagcggatccacatctggtaacagatgcctctggggccaaaagccaaggtttaacagaccctttgggattggttcaaacctgaattgttatggaagacatttagtacctgctgatttggtggtagtgcaaacactagttgtaaggcccacgaaggatgcccagaaggtacccgtaggtaacaagtgacactatggatctgatctggggccaactacctctatctaggtgagttggttaaaaaacgtctagtgggccaaacccaggggggatccctggtttcctttttatttgaataatcact

SEQ ID NO: 503 - DNA, 708 bp, Human parechovirus 4
  source 1..708: isolate = K251176-02; mol_type = genomic DNA
tttgaaaggggtctcctagagagcttggccgtcgggccttataccccgacttgctgagcttctctaggagagtccctttcccagccctgaggcggctggttaataatagcctcaagcgtaactaatatctaagaagattgtgcaaaccctatgcctggtctccactattcgaaggcaacttgcaataagaagagtggaatcaagacgcttaaagcatagagacagtattcttttctaacccacattactgtggggtggcagatggcgtgccataattctaatagtgagataccacgcttgtggaccttatgctcacacagccatcctctagtaagtttgtgagacgtctggtgacgtgtgggaacttattggaaacaacattttgctgcaaagcatcctactgccagcggaacaacacctggtaacaggtgcctctggggccaaaagccaaggtttaatagaccctttaggattggttctaaacctgagatgttgtggaaaatatttagtacctgctgacctggtagtaatacaaacactagttgtaaggcccacgaaggatgcccagaaggtacccgtaggtaacaagtgacactatggatctgatctggggccaaccacctctatcttggtgggttggttaaaaaacgtctagtgggccaaacccaggggggatccctggtttccttttattttatcatatttaat

SEQ ID NO: 504 - DNA, 696 bp, Human parechovirus 5
  source 1..696: mol_type = genomic DNA; strain = CT86-6760
tcctagagagcttggccgtcgggccttatacccgacttgctgagtttctctaggagagtccctttcccagccctgaggcggctggtcaataaaagcctcaaatgtaactaacatctaagacatttatgattcaaccccatgcctggtccccactagtcgaaagcatctagccataagatgagtggactaaggacgcttaaagcatggagccaacaaccatttctaacccatgttttgcatggggtggcagatggcgtgccataactctactagtgggataccacgcttgtggaccttatgcccacacagccatcctctagtaagtttgtaagacgtctgatgacgtgtgggaaaacactagaaatattaacttgctgtaaagcatcctactgccagcggaatcacatctggtaacagatgcctctggggccaaaagccaaggtttagcagaccctttaggattggttcaatacctgagttaatatggaaagtgcttagtacctgctgacttggtagtagtgcaaacactagttgtatggcccgcgaaggatgcccagaaggtacccgtaggtaacaagtgacactatggatctgatctggggctggatacctctatcttggtgatccagttaaaaaacgtctagcgggccaagcccaggggggatccctggtttccctatttttattattatcact

SEQ ID NO: 505 - DNA, 618 bp, Human parechovirus 5
  source 1..618: isolate = 4112/SapporoC/July/2018; mol_type = genomic DNA
ggcggctggtcaataaaagcctcacatataactaacatctaagacaataatgtacaaccttgtgcctggtccccaccggtcgaaggcatctagcagtaagataggtggaacaaggacgcttaaagcacaaagacaacctatttttctaacccgcaaattattgtggggtggtagatggcgtaccataattctactagtgagataccatgcttgtggatcttatgctcacacagccatcctctagtaagtttgcaaggcgtctggtgacgtgtgggaacttattggaaataacatcttgctgcaaggcatccattagccagcggaataacacctggtaacaggtgcctctggggccaaaagccaaggtttagcagaccctaatggattggttcaaacctgggatgttgtggaagatacttagtacctaccgatctggtagcaatgcaaacactagttgtaaggcccacgaaggatgcccagaaggtacccgtaggtaacaagagacactatggatctgatttggggccaactacctctatcctggtgagttggttaaaaaacgtctagtgggccaaacccaggggggatccctggtttcttttacttatcactgtcatt

SEQ ID NO: 506 - DNA, 709 bp, Human parechovirus 6
  source 1..709: mol_type = genomic DNA; strain = NII561-2000
tttgaaaggggtctcctagaaagcttggccgtcgggccttataccccgacttgccgagtttctctaggagagtccctttcccagccctgaggcggctggtcaataaaagcctcaaacgtaactaacatctaagattgatttaataacaccatgcctgatccccaccagtcgaagacaactagtaataagacgggtggaataaggatgcttaaagcatggcgtaaatattcttttctaacccatgatttcatggggtggcagatggcgtgccataactctattagtgagataccacgcttgtggaacttatgctcacacagccatcctctagtaagtttgtgagatgtctaatgacgtgtgggaacttattggaagcaacaatttgccgtacggcatcctactgccagcggattcacacctggtaacaggtgcccctggggccaaaagccaaggtttaacagaccctttaggattggttaaaacctgaattgttgtggaagatactcagtacctgctgatttggtagtaatgcaaacactagttgtaaggcccacgaaggatgcccagaaggtacccgtaggtaacaagtgacactatggatctgatctggggccaactacttctatcatggtgagttggttaaaaaacgtctagtgggccagacccaggggggatccctggtttccttttttatttcactacagccaat

SEQ ID NO: 507 - DNA, 616 bp, Human parechovirus 6
  source 1..616: isolate = AFW; mol_type = genomic DNA
cggctggtcaataaaagcctcaaacgtaactaacatctaagattgattcaataaccccatgcctgatccccaccagtcgaagacaactagtaataagacgggtggaacaaggatgcttaaagcatggcgtaaatattcttttctaacccatgattctatggggtggcagatggcgtgccataactctattagtgagataccatgcttgtggaacttatgctcacacagccatcctctagtaagtttgtgagatgtctaatgacgtgtgggaacttattggaagcaacaatttgccgtacggcatcctactgccagcggatccacacctggtaacaggtgcccctggggccaaaagccaaggtttaatagaccctttaggattggttaaaacctgaattgttgtggaagatccttagtacctgctgatttggtagtaatgcaaacactagttgtaaggcccacgaaggatgcccagaaggtacccgtaggtaacaagtgacactatggatctgatctggggccaactacttctatcatggtgagttggttaaaaaacgtctagtgggccaaacccaggggggatccctggtttcctttttattttactacagccaat

SEQ ID NO: 508 - DNA, 511 bp, Human parechovirus 7
  source 1..511: mol_type = genomic DNA
ggttcagacgcttaaagtgtgttgtacatattcttttctaacctatgtttcacatagggtggcagatggcgtgccataactctaatagtgagataccacgcttgtggaccttatgctcacacagccatcctctggtaagtttgtaagacgtctgatgacgtgtgggaacttgttggaaataacagtttgctgcaaagcatcccattgccagcggattaacatctggtaacagatgcctctggggccaaaagccaaggtttaacagaccctttgggattggttcaaacctgaattgttatggaagacacttagtacctgctaacttggtagtaatgcaaacactagttgtaaggcccacgaaggatgcccagaaggtacccgtaggtaacaagagacactatggatctgatctggggccagctacctctatcttggtgagttggttaaaaaacgtctagtgggccaaacccaggggggatccctggtttccttttattttaaaatattcact

SEQ ID NO: 509 - DNA, 637 bp, Human parechovirus 14
  source 1..637: clone = V3C; mol_type = genomic DNA
tccctttcccagccttgaggcggctggtcaataaatgcctcaaatgtaactaacatctaagattaacttagacaaccctatgcctggtctccgctagtcgaaggcgccttgcaataagacgagtggaacaaagacgcttaaagcatagtgaaaatatacatttctaacctgtggcctccacagggtggcagatggcgtgccataactctattagtgagataccacacttgtggaccttatgctcacacagccatcctctagtaagtttgtaagacgtctgatgacgtgtgggaagttattggaagtaacaatttgccgtaaggcatcctagagccagtggattaacacctggtaacaggtgcccctggggccaaaagccaaggtttaacagaccctttaggattggttcaaacctgggttgttatggaagatatttagtacctgctgatttggtagtaatacaaacactagttgtaaggcccacgaaggatgcccagaaggtacccgtaggtaacaagtgacactatggatctgatttggggttgactacctctgtcctggtgagtcaattaaaaaacgtctagtgggccaaacccaggggggatccctggtttccttttattttattacaaccatt

SEQ ID NO: 510 - DNA, 667 bp, Human parechovirus 17
  source 1..667: isolate = 157Chzj058; mol_type = genomic DNA
cttgtttccactcattttattgcaagttgccttcaactagtggagaccaggcatgaggttaatgctataatcttagatgtttgttacagttgaggtttttattaacctcatgcctggtctccactagttgaaggcaacttgcaataaaatgagtggaaacaagacgcttaaagcatggtgtaaattagcttttctaacccacactttgtgtggggtggcagatggcgtgccataactctattagtgagataccacgcttgtggaacttatgctcacgcagccatcctctagtaagtctgtgagatgtctggtgacgtgtgggaacttattggaaacaacattttgctgtaaagcatcctattgccagcggaacaacacctggtaacaggtgcctctggggccaaaagccaaggtttaacagaccctttaggattggttcataacctgaaatgttgtggaagatacttagtacctaccgatctggtagtattgcagacactagttgtaaggcccacgaaggatgcccagaaggtacccgtaggtaacaagagacactatcgatctgatctggggccaggtacctctatcttggtggcctgttaaaaaaacgtttggggggccagcccggggggggtccccgggtttcttttatcttacaactgctata

SEQ ID NO: 511 - DNA, 592 bp, Human parechovirus 18
  source 1..592: isolate = 11Chzj207; mol_type = genomic DNA
cgtaacaaacatctaagattatcatattaaccccatgcctggtctccattagttgaaggcaacttgcaataaaataagtggaaataagacgcttaaagcatggtgtaagttttcttttctaactcacatcttgtgtggggtggcagatggcgtgccataactctattagtgagataccacacttgtggaccttatgctcacacagccatcctctagtaagcttgtaagacgtctggtgacgtgtgggaacttattggaaacatcattttgctgcaaagcatcctattgccagcggaacaacacctggtaacaggtgcccctggggccaaaagccaaggtttaacagaccctttaggattggttctaaacctgaaatgttgtggaagatatttagtacctaccaatctggtagtattgcaagcactagttgtacggcccacgaaggatgcccagaaggtacccgtaggtaacaagtgacactatggatctgatctggggtcaactacctctatctaggtgagttggttaaaaaacgtctagtgggccaaacccaggggggatccctggtttccttttatcttaaatagtgact

SEQ ID NO: 512 - DNA, 528 bp, Human parechovirus 19
  source 1..528: isolate = 67Chzj11; mol_type = genomic DNA
ttgtgtcaaatttgtagtgtttacagtagttgtagcttgcacgacatccttgttctccggttgggctgtggttgcaaaactatttggtcctagtaaattagaagcatcatctgcaactttggttattatttccccgccaacttcattgccagaaataatattattagcttcagtttctacattagacaaggagagagtatccatagcaccagtagcaacattaactaaatccttgatagactccataatggctgtttaaaattaaaagaaaaccagggatcccccttgggattggtttaaacctgaactactatggaagacatttagtacctgccaatttggtagtagtgcaaacactagttgtaaggcccacgaaggatgcccagaaggtacccgtaggtaacaagagacactatggatctgatctggggccaactacctctatcttggtgagttggttagaaaacgtctagtgggccaaacccgggggggatccccggtttcctttatttaataattagattcatt

SEQ ID NO: 513 - DNA, 759 bp, Ljungan virus strain 145SL
  source 1..759: isolate = 145SLG; mol_type = genomic DNA
ttgaaaggggggccctgcagccgatataggctgcagggttcccctggtggggtgggtacgtctctcgctcattgagtgggggcgtggctcaccaaccacacctggttggtccccaggttcatgcaataaccactttttgtaatctttacatctaagcttaattcacccactagaactggacgaaaccgcttggaataagtttggttctctcttgagtgtgttttgtgttagcataatttctgtctctagagtgctttacactctagtaggggctgtacccgggcggtcccactcttcacaggaatctgcacaggtggctttcacctctggacagtgcattccatacccgctccacaatagaagatgatgtatatctttgtttgtgaaatgctcatgaaacgtgtgtgtaggcgtagcggctacttgaatgccagcggaacccccctagtggtaacactagcctctgggcccaaaaggcatgtctctgaccattcaagtacacaaccccagtgatacacacatttagtaatggctcagtaatggacattgattgatcatcagacaattgttaggaggcctaggtatgacgggctgaaggatgccctggaggtacccgcaggtaaccttaagagactgtggatctgaccaggggcccaccatggaaacatgggtagaagtcttcggaccttgggttaaaaaacgtctaggcccgccccccacagggatgtggggtttcccttataaccccaatatcacatt

SEQ ID NO: 514 - DNA, 634 bp, Ljungan virus M1146
  source 1..634: mol_type = genomic DNA
agaatagccaatctgtaacttcaacacctaagcgcatcttgcccgccgttatctggtcgaaggcacttgcaataagactggttaaccctccatgcgtgattcacaatcctatctgtctctcgagtgctttacgctcgggtaggggctcacccaggaggtcccactctttacagaggtctgcgcaggtggctttcacctctcgacagcgcccctcaatcctgccttaggtgtgaaggttgcacgtattccaatgtgaacagtgcttgaattttgttggtaggtgtagcgaccacacatgagccagcggatttcccctggtggtaacaccagcctctgggcccaaaaggcatgtctttgacctcatgtgtgcacaatcccagtgatgccaatgattagtaaagcacttagtatatatatgggatataccaatctcaagcacctaagggtgtaggtatggtaggctgaaggatgccctggaggtacccgcaggtaacgattggttcactgtggatctgaccaggggcccaccggaacttcgttctgggtagaagctctcgagccttgggttaaaaaacgtctaggcctatcccccggggggacccggggtttcccttataaccccatattttgcatc

SEQ ID NO: 515 - DNA, 584 bp, Ljungan virus 64-7855
  source 1..584: mol_type = genomic DNA
ggtcgaagccgcttggaataagactggtgctgttcacagtgtgttcacgatctatgcaacttctgtcttccatctgtgtctatgcaggtggataagggctgtacccgggcggtcctactctccacaggggcctgcgtaggtggctttcacctctggacagcgcaccccaccccgcctactgagtgaagggcatacggcttttctattgcgaattgtattgaagtttaggattaggtgtagcgaccacatgtgtgccagcggatctcccctggtggtaacaccagcctctgggcccaaaaggcatgtctctgaccacacatgtgcacaaccccagtgataatcctttttagtaaatgcttagtaacagtggattagcagtgctcctcaagctcagtagggcttaggtatggcaggttgaaggatgccctggaggtacccgcaggtaacgataagttcactgtggatctgaccaggggcccaccgggaattccccgggtagaagccttcgggccttgggttaaaaaacgtctagacctgtcccccagagggatctggggtttcccttttaaccccaattattcaat

SEQ ID NO: 516 - DNA, 740 bp, Rattus tanezumi parechovirus
  source 1..740: mol_type = genomic DNA; strain = Wencheng-Rt386-3
cccgtggcttatgccacgggacccgtgcccccgtccagggggttttacttatgctcaggcgtttgcattatcgcctggatctggctctgggcaccctttcagcccctgggcatgggtttaaactgcctacctgtaacacttaacatctaagaaactgatttgtaaccaaccctggccagatgttgccagcccaagccacttggaataaggtgggcaatgtcacattggtgcttaaaggttgcgtccaaatttttcttttccaaccactcatgtggacggtgtgcaaactccaccgtaacacttctaggtgacttccacacttgtggggctaaagcaccagagtctttgcttcaaccatattgtggtgacagcaaagcatcctgaaattagttagtaatgattctagatccacttctgtggtgctgcatgcctgcggagcaatggggggtgaccctcacctcaggggccgaaagccacggtgtttaaagcacccatgcagtatgcttgtctgtttaggattgtgaacactgaaagtaaggatgatgagtggtcactgtggtcactggttgtcgtacgggggctgaaggatgcccagaaggtacccgtaggtaaccttaagagactatggatctgatctggggccagggagtgatgtactctatacacctgccttggttaaaaaacgtctaggcccccccaacctgggggaccaggttttcctggtcattttgcaaaggaat

SEQ ID NO: 517 - DNA, 696 bp, Parechovirus sp.
  source 1..696: mol_type = genomic DNA; strain = Parchzj-6
gtggagaccaggcatggggttaatgtcataatcttagatgtttgttacgtttgaggcttttattgaccagccgcctcagggctggtcaataaaagcctcaaacgtaacaaacatctaagattatgacattaaccccatgcctggtctccactagttgaaggcagcttgcaataaaatgagtggggttaagacgcttaaagcatggtgtgaattaacttttctaacccacactttgtgtggggtggcagatggcgtgccataattctattagtgagataccacgcttgtggaccttatgctcacacagccatcctctagtaagtttgtaagatgtctggtgacgtgtgggaacttattggaaacaacattttgctgaaaagcatcctatcgccagcggaacaacacctggtaacaggtgcccctggggccaaaagccaaggtttaacagaccctttaggattggttcaaaacctggaatgttgtcgaagatacttagtacctgccaatctggtaatagtgcaaacactagttgtaaggcccacgaaggatgcccagaaggtacccgtaggtaacaagtgacactatggatctgatctggggccaggtgcctctatcttggtgacctggttaaaaaacgtctagtgggccaaacccgggggggatccccggtttcccttttattttatcaatgctact

SEQ ID NO: 518 - DNA, 495 bp, Baskerville virus
  source 1..495: mol_type = genomic DNA
cctaagcttacattcacacttttaggtcacttccgatcgaaaccgaatcactaaaagctacaagaatgcggacgtctacatgctataaaccagactacaaactactaaaagattaataaaatataaaatctagaacatatcactaattaaaattaatgcgcgttatgcgtgtgcgctcccacgtgatgaaatagatcatcataaaggcacgttgttcgtgtgtgctcccacgtaacacgttatatcgtgtgcgtctccacggatagtttagagttgatatcagcaacaaagtagatgattagaaatcaaatctcaaaaagagaaaccctttcttcgatttcacctactcggagtagcacattggtattccaacgtatatatagatcacgagttgtatatctacatacagtcacaaatgccaggacaaacagtacaattaataaaactgaaactccggcaaactgtgcaactactcctgcacaaggaccaaacata

SEQ ID NO: 519 - DNA, 836 bp, Bemisia tabaci picorna-like virus 1
  source 1..836: isolate = CAU-Q1; mol_type = genomic DNA
tcttaaaagtagcttagtaagtggcgcacggggataataccccgtgcgtcacttactaagctacttttaagatctcttttgagaaccatatttattggctaataggttaccatttttagtcaatattatggcttaccaagagagatgtgtttttcatagcttaaatttataaacattatgtttttattttaaatatttagtatattagatcgattatgtatttgacatttcaatgtagtatattttggacttttaatgatggacggaaaagcaccgtgtttaaaaccttcgattggagaaatcctaaagacatgcaatgttcctatacccacaaaaagatttattataaaatgggttttatattgctagtgcctcgaagctaatttacacaaggcaagtacctgatgcaaatgatttattagtgcatatatatatgaatagttaatcttagataggacggatgattgacactcatccttaccttcctttgatttgacagatacataatatatcttttgaattgaggttaaatatgtaattagggatgtaatggtagaagtgatccttttcctcaattatagtggtgaactactaaataatgttaatttttaaaactaatggcgagattgagatgtttgattaattaacatttgatgtggtactgccggcggattagcattgccgtacggagggagctcacttaagaaaccgaagcgttaacaacgtgaggtaacttctacaaattttattttattttaatatatgtttgtcattttgtgttttgcgttctttgcgttttattgtgtttattctgcgtttttatagtttgatttaat

SEQ ID NO: 520 - DNA, 849 bp, British Admiral virus
  source 1..849: isolate = MW13_1o; mol_type = genomic DNA
acggagtttacgtttcttttacccatgcgttcgcgtatggggttttcttgcaaccactatggttcgccatagttggatgcgatccccgtcctcactaaccgacgttaaactgttggtattgtaacctccaatcccccctaacctaagtctatccagtttcttggtatctgcaagaaccaagcgcacaccacaagtggcgacaagacttgtggaggatcatgcactaaagcatgcgttctatgcacgttttatctagagacgcgtatatgaatgttatctgttatctagaccccttattccccttgtgccatggtgccactggcctatgagtcgggtcctctcctgacccgtcagcacccattctaaagactgttagcacagttattagtctgtgaactctcgcgaaagcgttagtgttttctagcgatgcattgattgcgcgtggaacccccacctggtgacaggtgccccgcggcccaaaaggctagtgtgtcacaacacaccgtcaatgtgccagaatccccatctggcagcactaattgttagtaccgattagtaaccactaatcatctgtcctggccgaacactctttggaatgagcataggagttagtagaccccctagcgctaccctcgggcgtgactagggccagttgactatactgttccggtaataactggttaaaacaatgaaagctcactatgcgaactgccctacccaagggggccgtcctcacggccttccccgaacgtcggcagtctttccttctctttttatcaaaatgttttatggtgacaatattgtgtatttagtcttgttgctttctttggttttatctaataattttat

SEQ ID NO: 521 - DNA, 975 bp, Carfax virus
  source 1..975: mol_type = genomic DNA
cacggggttaacacctcgtgcgatcttttcaaccacatatatatatattctgggcggaatattagaaaatcttgggattatatatatgtaattgatatattgggcggaatatttgaaaatcttgatatatctcttacaaaattttgaaaccaaccattttagaataggtttattagcgtgacaaactatgcgacctgtagagaaaaatgtcaaaatcaatacaaaattttaaaatgttaaaaatgtttatatatttagtaaactcaagttgaattgtgatagagaaggcaagtaactaccagatgactcttctcgcaacaggattatcccagactgttgttccagcaaattgatggatgtaaactaaatttataatgataaatagttaagtaggagacccttatggtactcaagcttgtattaaaatttttaactatagatatgtattattgaaatgtgttctgtctcttatatgtacacccacgtagtcgtggtaccgctataacgccaatcggactaaataacaagaatgtgaggttcctattgagatttcaaaatttatcatattgtcacgaccaatctctttgggtaaggacttgcatggtatgcgaaaggtcggattgccagaatctgcttgctgctttctggatgtgtacacattttaattttaagatttatgatagttaatttgataatacaaggacagtgcgttttgtgacgtgcttgtttgcatctctgtcttagatgacaggtttctacactaggcgatgtgtagaagtgtagacctctaatggtttggtgcatcgtgccccggttctttttcaaggcttctccggttcaaagatagcggaggacccccctttgtaatgcagacaccattgtggataatttatctacaattcgaagcgataatttttccattcatttttgtatctttaaaacttcttacggagattttcaatattaactagaaaa

SEQ ID NO: 522 - DNA, 663 bp, Chicken picornavirus 4
  source 1..663: isolate = 5C; mol_type = genomic DNA
gggggctctcccccacggcctcttttcccgaccggtctggcaaaccggacggttatcctggttaggtgtccgatggatgctggaacggggtggctatagctgcctccttctggcttcctttattgggcattctagctgggccctttgccaaaattccatcttaatcttaaacccattttctatacccaggcttgcttgtaactggtaagttgacccactggcttgtcttaagactattctggtgttggtggacactccttccacaagtaagtattgtggagttcatgctcgttctgaaccgggaatggcacaccccgtagtaggatcttgcctctgccacatatacttgcgcctgttgcttctagactatgggctactaaggatgactacggacccctttttgggtaatctgtgtcaagtctactgtatcatctggtgtacgctggaaatccttgttctggaaactgcgtctggaggtggtgctgaaatattgcaagccacagatgcatttctggtcttggtgccgctactaggtgttacaccccctgtgggcaaatgtagaaccttggtggacgcgtgagatgggaatccacgcctggccatagactggctgataagctcgcggctgatcgagttgcaacagtaatcagttgatttgccact

SEQ ID NO: 523 - DNA, 679 bp, Chicken picornavirus 5
  source 1..679: isolate = 27C; mol_type = genomic DNA
aaaaggggtccgtgggggttctcccccacggctccttttcccgaccggtctggcgaaccggacggttatcctggttagatgtctgatggttgctggaacgtggtggctatagctgccaccttctggcttcctctattgggcattctagctgggttctttgccaaaattccatcttactctttacccattttctctacccaggcttgcttgtaactggtaagttgacccactggctttagttcatgattattctggtgttggtggacactctttccacaagtaggtagtgtggagttcatgctcgttctgaaccgggaatggcacaacccgtagtaggatcttgcctctgccacacttacttgcgcctgttgcttctagactatgggctgctaaggatgactacggacctctttttgagcaatccgtgtcaagtcaactgtttcatctgatgtacgctggaaatccttgtttctggatgattgtatcctggaggtggtgctgaaatatctcaagccacaggtacgcttctggacttggtgccgctgtcaggtgttacaccccttgtgggcaaatgttgaaccttagtggacgcgtgagatgggaatccatgcctggccatagactggctgataagctcgcggctgatcgagttgcaacagtaatcagttgatttgccact

SEQ ID NO: 524 - DNA, 447 bp, Chicken proventriculitis virus
  source 1..447: isolate = CPV/Korea/03; mol_type = genomic DNA
tggctttgttcttagactatttttggtgttggtggacactctttcsacaagtaggttatatggagttcatgctcgttctgaaccgggaatggcacaacccgtagtaggatcttgcctctgccatattaatctgcgcctgttgcttctagactatgggctgctaaggatgatgttggaactcctttttggatattccatatcaagtcaactgtttcacctggtgtacgctggaaatccatgctttaagtcctcatccggaggtggtgctgaaatattgcaagccacggatgactcttgaagcctggtgccgctactaggtgttacaccctttatgggcaaatgttgaaccttagtggacgcgtgagatgggaatccacgcctggccatagactggctgataagctcgcggctgatcgagttgcaacagtaatcagttgatttgccact

SEQ ID NO: 525 - DNA, 619 bp, Zebrafish picornavirus-1
  source 1..619: mol_type = genomic DNA; strain = NCSZCF/ZfPV/2015/North Carolina/USA
tgaacgcatgcgcatatcctctttcccccggagcctcaccggggaccgcctcatggtgacctgatcggtcactactgtggtggtgaacaaatgtctaggacctttcactccaaatccctttcccctttttctacttcttagtacgcctcggctcgctcatccgttgtgtgctcaaactcccctcctcctacaccctttccccccccctcccgagtgactcgcacttagtcgtaggtttggtgtctttcaccatttctgtgcctatctatgtgtcctttggatccgccctcgaatgccctctagggtcttctgcgaaagcttgcaaagccgcgccccccctccactgttcttggggaccgtgcgcagccggaacttttgacatttgactgaacagtacagcaatgtagcacgtctcttgtctttgccggttagccctcgtggtcaaactttgtaagttagtacacttaagcactctcctgtggtttctcttgggaccttccaattgtaggaatccttggtatgccttcgaatagggacggacgctctaaatgccccgttcgcgaagtcgacgcctgaatgaccaaggtttttccacctttcctcaaaacccttcttttta

SEQ ID NO: 526 - DNA, 836 bp, Duck picornavirus (duck/FC22/China/2017); identical to SEQ ID NO: 519
  source 1..836: mol_type = genomic DNA

SEQ ID NO: 527 - DNA, 625 bp, Eotetranychus kankitus picorna-like virus
  source 1..625: mol_type = genomic DNA; strain = EKPLV.abc9
cctattgagaagtgaactttcattttctatacaaagtgctatatttcgagcgacagtgtaaaactaaacaatagtgtacataacttattactcaaaatatagttaagacaaaagtcctctggaccccagtccagaggatctttgtcttaactatattttgagtaataagttatgtacactattgtttagttttacactgtcgctcgaaatatagcactttgtatagaaaatgaaagttcacttctcaataggagtatgtacttagtagattatataacagctgattattattggctgaaataatccgtaataatcgtaagtcgattatataagactacacgctcattttgtggttatttcaaatttaacaacttttgaaaccactttcattttaagatgtgtgttctatttatctagacgcatattcatattcacttgtttagtaatttcaccctactaaactcgtattcacgatacgtattttccagaattagtttactaatgagattatacgcattaacattttcgttagacttttgatacatacaaatctaacccttgtttggtaggcaagtacaacctactggtttcccgagacctatgaggggcccaataaatatgaaag

SEQ ID NO: 528 - DNA, 867 bp, Falcon picornavirus
  source 1..867: mol_type = genomic DNA
tttgcgcgcgggacctctgctacggccgggctcatattatcctccggggttttatgggtcgggcctagcccctttctgtaacggtctgtgtgagacctaaaaccacacataatatcgtgcctgatggttaacgcttgttagccgtctgtaaactaagaacctaccaacacactatgcacctcttggcgaagccgcttggaataagttgagaggaattatgcatgctagttgtgtttgtttacaactaattgttctaatccaagtgaagctcttcgcttggggcggcacgacacttgccgtaattcttctaccgtccctccacaccttgtggatgaagggccggatgtgtggcctctggctaacccctctctctggggtgatgctactggatgttttactcctagaccaaatcacatgaactcctcttgatccacttcggtggggctatgagcctgcggattaatagctggcgacagctaccccaggggccaaaagccacggtgttagcagcaccctcatagtctgatgcccaagggctgatgttgggagctagtagtgtgtgtctggcctatgtttaggacttctggccaagcgcagaggagtggggctgaaggatgcccagaaggtacccgtaggtaaccttaagagactatggatctgatctggggccccctcacgtggctttaccacgtgttgggggttaaaaaacgtctaggccccaccagcccacgggagtgggctttcccttaaaaagcccaacaatatttatggtgacaattcactgtttcttctttgcaatttttgtattcttggactccttattttttgtttgcttgattttagtggacattcagattcaaatacaaa

SEQ ID NO: 529 - DNA, 303 bp, Feline picornavirus
  source 1..303: mol_type = genomic DNA; strain = 661F
tggccaccggggaaaaacggctactgtgcaccacctctgcaccccacgccgaccacgcctaaccatggcgttagtaggagtggaggaccactgcagagggtcctggtgtgcgacagtcagtggtagagtagacagtcctgactgggcaatgggaccgcgttgcgtatccctaggtggcattgagatttctctgccacccaccagcatggattcctgtggggggggccccatgggctaggtctatactgcctgatagggtcgcggctggtcgactgctgactgtataaccagttgtaacttact

SEQ ID NO: 530 - DNA, 542 bp, French Guiana picornavirus
  source 1..542: isolate = French_Guiana_Picornavirus; mol_type = genomic DNA
tgttcagccacgatggcaagtggtaaaatcttgcccgcattctttaagtgcgttactttatcttctcctttatatcctatcttttccaaggtgtagctcacatctttaggcgggtcttatttataccgtcaccgagcgggtggaagtgaagactatagttagtaaactcactttagtaagtccttttggtacgtaactgtcaggggcttggactgggggccgtaggtggggagacccacacccccggtggccaaaagcctagtggatcgcaatccaccggccctggccactcttttgagtggatccttaaggaaagaacgggtagcgaaacctataggggatccgaaaccgtcagggggagccgagtagatgccctgggataactggagcggccgatgtgacgcccggtgtcttttcatcgggcgcacgcgcccgccccaggtaaccaggggccaggctacttacaagctggttaaaaaccatgaaaggaatacccccgaaattgctaactaacttatctctgtggtgttgtggtgggcacc

SEQ ID NO: 531 - DNA, 587 bp, Leveillula taurica associated picorna-like virus 1
  source 1..587: isolate = PM-A_DN31116; mol_type = genomic DNA
caatagggtaacctattgtaacttggacttattactttatcatatagtttattgtttaaatcggaactagtgtattatgtttaaataatatgtgttagcctttaaactttattctattatttgataaggttcaataagtttgtatgactagatccagtaactattgctcaattttaaaacaatcttaaaaatctgtatgaaacgcagatcaatttaatattttagaactacccgtatttatataggctcttctaaaatatgaattgttatcgaaagataccttattattggttgattaatttcttaatgtgcatggtggcacctttaataagtagatttccgtcattctctatttagagtacttttggacgttaactaatgctccattcagtctagaatgtatgataattaaactctagattgtataaactatcattatcgcaagtaccacatcaaataaaacttatgaaaaaccgcaattactcgatgataactttgctcctgatgttagtgatattactaatactaactttctcgaggaaagggtagtcgaaactagggaagcatatccatcaacatctcttact

SEQ ID NO: 532 - DNA, 621 bp, Moran virus
  source 1..621: mol_type = genomic DNA
gggggctcttcaagcccccccaaccgaattttcttcaacaactactatgtaagttgcattatactctccagatcaattcgaatttgtataatgtactttagtttttgttgtcgactacagtgattataagtaagtagcaatatgtgtccagatcaattcgaatcacaatattgttcattataattgtatgtaggtctcagttgagagaaaaattttgttttgaaaacccagttttttcacaccggaggaatgaatctcaaatcttgggttttcgaggttgtcgtgcggacacttctcgagtagttgaatgatgctgatttgactgctttggaatgttgtcttttgcgatgatgtcggattcacacgggcttcacatgccgagagatggcttcgaacacgctcgtgataatgtcagtggttgcttcgagatttacaaatgtatgcgtacccggaaacagaacttggaaattgatgtcacggtgattgagttctgcacgatggcgatagtacctctttgtactgatcgttgaactggtcaaggcccctgcaggaagtacctgtttcgggctagttgactggcattgagcaccagagtcgaagtttgcccttcaaattgcaaca

SEQ ID NO: 533 - DNA, 944 bp, Mus musculus picornavirus
  source 1..944: mol_type = genomic DNA; strain = Wencheng-Mm283
accccggtaaaggtcagggtgtacttgcccacgttggtcggcttgtcaacactggttccggctttatcctgatacgtcaccgtgtactcgctgccatcgatcacaaacccctcatcgtccttgacagtgaccgcaggctcctgcttctctccgttgaacgtcaccgagggcggcgtcacctggatggtgggcgcggtcacggtgttgctgatgatggacgcatctaccgaagcaggtgtgctgtcattgtggttgctgtcgccctgggccttgtaccagacagtgtaattgtccacagctttcccggtgggaatggttggagtatacgggccgtcctcagccagagcgtagaccatcgtgccgtcggaagcggtgcccgcctcaatcagcgcctgctcggtgccgttgtagggcagattttccaaacccttcggagccgttgccaccgatgcagcacccttcgcaatcacaaaggtccccgtaccgtttacgatgtagttgccgccgttggcgttggtgatgatgaccgtcgccgtaccggcgttgatgttgtcgcggtaggacagggtgtactcgtcgctggggatggtgttgccgccgtcctccaccttactgcgagactcctagtagggagtggacgtattttgtgtgtgacccggagtttcccccgctccagaaacctgtgatgagctatcctcacgcccacctggcaacaggcgaggacgctgcgttggcacaggacctcattgaggctcacaacttgctgaagcaaacgaagagacgattgcgctaaggtggtttcctccggcctcctgaatgcggctaatcccatcccttggtcatccgcccactagccagtgggtagggtgtcgtaacgcgcaagccgagggcggaaccgactactttggagtgtccgtgtttctattttattttatacggcagtc

SEQ ID NO: 534 - DNA, 541 bp, Ovine picornavirus
  source 1..541: mol_type = genomic DNA
aaaatggggtgcatatagcatggttcccatgctgtatgctaccccattttcttccctccccctccaactaccttttccccctctattgtaacttagaagctaatacacatagcccaataggggcaccacacccagtggtgtatagggcaagcacttctgtttccccggctttgccgttaacccccacagtactacgcgactgttagtaggtaacgtaactagtgaaggttgatccggaggtaaaccccaacctccagaaacgtgagatgagggttcagtaaccccctatggtaacatagactgatccctgcgctggctcacgggcttcgtgcactgaatctaggtaaagttactgaagccacgagtgtgctactgtggtttcctccagcgccttgaatgcggctaaccctaaccccggagcacatgcatataatccaatatgtagtgtgtcgtaatgagtaattctgggacgggaccgactactttaggttgctgtgtttcctttatttttatatatcaatttatggtgacaagttacaag

SEQ ID NO: 535 - DNA, 640 bp, Pigeon mesivirus 2
  source 1..640: mol_type = genomic DNA; strain = pigeon/GALII5-PiMeV/2011/HUN
ttttgaaaagggtcccagggggatcttttattccctctgggcccttttcacgtagtagggagtggcgcccctactgcgttactctgccaggtagtctgggtaggtaaacgggagatcggcttcgggcttatcttcttaatagcctacgtaactgggctgactggtgggggagctactagatccgggaaaggactagttaccccttgtaactctccttcgtgtcaccccatccacttaccctttttccctaccccttagaatcttaagtagatgtgcaggcctggccccccggaaatgggcaaatcggacgtttgcgtgtagggtcgttctgaaaggtggggcccactccaccgtagtaggatcttcctgtttcacgtttaaacctctccgggcaggtgtcgctagacactaggctgtataggatggcaagcacttaggtttcgcaccttcctagtgcgccaagaccccgtcttttagttttagtacatggttctttgtaagatgtctaaccagaggaggtggtgctgaaatattgcaagccactctggcgaacgtccgctgcattgcctggaacgaactttctgacgtctagcactggtagcgcggtactagattagtagggtacctatatggacagggg

SEQ ID NO: 536 - DNA, 460 bp, Red-necked stint Picornavirus B-like
  source 1..460: mol_type = genomic DNA
ctccactctcctttctcccttccccctccctttaccttttccccctctgtaactaagttttgtccctgcagagcagtgatacgacataaccgagttggaacgcgtattgggtattggtgaatatctatctcatgtggttaagctaaggcttgaaatacctttggcattgggttatagtagggcattagtgttcccacatgagagaaccatctatccacttgacacagtgggtgtatagtacaaaggaccctatttggtatcctgacgcgtgggcgagtaagtcttgctggatttccgcgagcatcaaccacaccctgatagtctcaatggggtcactcccgagacggggcaagtcacctatacactacctatggttgggaagccatagctggactgtgacagcttgatagagtgtcggcgggcacagtggattggatgtaaagtccgttgaaatgccatt

SEQ ID NO: 537 - DNA, 412 bp, Sphenigellan virus
  source 1..412: mol_type = genomic DNA
ttctcttttatttaccggttgacgtcatacctatgctgctaccactgcgcccggtggggttaactctaggattagcctagagctgtggccgctaaaagtgacgtaatggtgactaatttgaatgtaacaatgtagtggttaagacactcagaggttcacattgatcttgttgggttggtaggctacgggtgaaaccaaccacacctctatattacattaatatatgtgtatgtgaacgctaaagccctggataatgttgagttctatagacaataaacattcaacagggagtccactggtgtatcatcaacatgccttgtgtttctgatgagtgttgtttccctcattgccaagttcaataagccattccctatgcgtttagggctactcaggggcatttaggttttggaca

SEQ ID NO: 538 - DNA, 541 bp, Sphenimaju virus
  source 1..541: mol_type = genomic DNA
tgtttcccccaccagtgggttcaaattccgcccaggcggtatgcctggacggaatttggacccactggtgggggaaacaccagcacgttctaccgtgtgctacggtggtcatgacaacgtgtggcttgcgttgtaacgtttgccgtgtttgacggctaagtatgagtgagaaagaattttcttctaaatttcttttacttttattttcccggctgtcgtcatgcctatgctgctaccgttgcgcccggcggggttaactccatgattagcatggagctgtggccgctaaaagtgacgatttggtactttctatgggcaggacatgtcagtataccagacatgttgcactcgctatgatctttctgtttggggtaggctacgggtgaaacccctttaggttaccactatgtgggagaactactggtacgctaaggccacggatattggtgagttgttagacaaaaaccattcaacgtggagtccaccggcggtacaggcagaatgcgtagtttagtgtttcatttctgagaactgtattcta

SEQ ID NO: 539 - DNA, 843 bp, Washington bat picornavirus
  source 1..843: mol_type = genomic DNA
cctatcgacagagtttgttgccgttaaaaagaggtcccaggggtgtttcccctggggcccctttttaacggcaacaaactctgtcgataggctaacgccgagcgttcacttagtgagggcgatttacatcacataacaccgccttgtttgacatgtttcactcaaggacaagatatggtaaatctgtgcactacttgaaaattctcgacgttagcggagctaaaacaacaccacaacacaacacaacaattaacaacacattagaaattcgaatttagaagttagaccccaatttttgatttaacatctgttattttgactttgggcaatccactgatctttgaatttcacacgacagccgtggagagacggcacacgctacttcagcatagatccaaggatagctggtagcggcgacgaagtccacaatcactctatattttcaggcttctgaaagtgctgataaattgattaagttcggtttatcggaattgccgaggtccctcgaagaaacccgcggaaatgagaatatagatgttggtatggcagccagaagacatgaactatgacaagtacgtacgagcgtgtgttcggacctggttccccgccttaggatcagcgccctgtgaggggaccctttggaaagatgatcactacatagactactcgaacgagaaactatgcaaataacagggaacgtttggccacccggatgaatccagtagtacggaaaagcttaggaattcgattttggatcttttacctgtgttttaataagaaatgcaggagttgataaatagggctcgactgggagcgagactgcagcggctaaagcagcagtaa

SEQ ID NO: 540 - DNA, 590 bp, Waterwitch virus
  source 1..590: isolate = MW03_1o; mol_type = genomic DNA
gggctattgcccggtgactctttggagccgccaactggtagttggagcgtagggtcagctataaggccccgatttcactttgggtcgtctttaccaagtgagcgtttgccgtgctctacggctagtgtgattgtgtagtgtgagtgttatttctcctgaactatctcttgttttccaggctgtctccatgccgatgctgctaccgttgcgcccggcggggttaactcaacgactagcgttgagctgtggccgctaaaagtggagatgcagggactcgtattggtgtgtgttggttcagttttaacctcttgctgattggcacgcatgatctggggcggaaggtaggctacgggtgaaaccttcctgtatcggagctcctatggagctgccgccactaggtacgctaaggccctagttaggtgatgctttaacgagataagcctcaatggggagtccaccagcggtactaggcccttgcgtgcgtcccggttggtaagggggctggtccagccctctaccaatctatcctgtaccctacccctcggtttagggctactcaggggcatgttaggttttggacaatgatctag

SEQ ID NO: 541 - DNA, 539 bp, Aphid lethal paralysis virus
  source 1..539: mol_type = genomic DNA
ttaaataagaaactatatattcttacaatatacatttcttgcgcttttaaggagaaatcctcaaaccttagacccgtaagacactaaggaagaaaaaggaaagatttctctcttgccccaagcccgtccagctcacgacgtgatataaacctcagcattaagcccgtctagctcccgacgtgatataaacgtagcattaagcccgtctagctcccgacgtgatataaacgtagcattaagcccgtccagctcacgacgtgatataaacctcagcaacactttccaaccaaaacaccaattagatatttaagttatttttacaattgattataaatatttactgcgtacgtccttgatcggagctcgtacagtattcgtactgatttgcacaaatcttcgcagtgttattggcttctttttgcctaaagttttgctattgatatttacactctttttcttttgcggtttagtaaataagaagagttatttatcttgtttgtttttgatttacgcatttgacacttataaaactatacaaa

SEQ ID NO: 542 - DNA, 708 bp, Cricket paralysis virus
  source 1..708: mol_type = genomic DNA
tttaataagtgttgtgcagattaatctgcacagcactagccacaaagttcagtggtcccaattatgggatataaaactcaatggtcgacggagtgacctggaaatgctccccgtgagaaaccttgtttaaacgcacttggaccttctccggcctcagcgccaggcatagctggatcgtcaatcccaagtttggacttagacttgctctatgttacaattgggaggagcgtgacttaccattggtcgttgatgacgttaattccaaacaaaaacaacaacaacaacttagtttaaataattccggtctttaagcatcagggtagaccgatgaggaataaagaaccctataagactgattcgataccaagagctggtgtctgagggattacgactcgcgtggtcggacagcacatgttagtcatgtattatggtgtttcccaacacgtatctttgctctagtattgaactttagtgatgagtgtacttggcatgtacacctgattagttagcccttgtggatacgccactgccgctcaggtacagtaggacataccccaaatattgggttccactcgtagagaagaaaattagtggcgaaacgtacggtttatgtcaaaggagaaggtgattttaattgcacctgaagcaaccctaggtcttccctttgatgtgagctaataaggagtaaccgattcttacaatgtgatc

SEQ ID NO: 543 - DNA, 798 bp, Drosophila C virus
  source 1..798: mol_type = genomic DNA; strain = EB
tttatatcgtgtgtacatataaatatgtacacacggcttttaggtagaatattgttttcaatgttgattttaaaggtaactttggttattatgctttacggttttcattgttgatggtatttgtggcctgcggtccctaattgttgaattatttattctgatacgttgttttcattgttgatggtaaggattcttattttgaagtggtttttcagaagataactctaaatatgaattatgccttattgttttcaatgttgatggccttcgtttaaatactctttgttaatgacggtaatcaaagattacatctcaaacttagattaatatttttaagtagggtatactgagttagtcctctctctttactgattttgatatctggtaattgacttcgaagaaagatgcgtcttttggatttgtaatgactgggccttaagttcataggtgttattacatggaggaacacattactttggttgatgatgatgttttgatgatgactttcaatgtatgtgcttatgttaagcctgacataagaacttactagtttgcataatgcaaagggttagtatatgatttttagtatgtggattttgacactgcctttgattaggatgtgtgaatgattttgaaacatattaagatgtttatacgagcgtgttgtttactattttcaggatatgtggaagcggttgtgtatgatctatacgcacatttagttcccagagggcgttgtcgtctccccctaagcaagggagaaacacgtggcacatgatcttgcgcttaacgataaaa

SEQ ID NO: 544 - DNA, 419 bp, Homalodisca coagulata virus-1
  source 1..419: mol_type = genomic DNA
caaaaattgtacgcagcaaacactgcgtacaatgagtagcatgactaagatggagagttcctaacccggctctcaaattagtgatgcaatacttaagtagtagaaacgaaagagttagcagatgatcgaacaaacatctaagtcaaaccaaaaacccaacccaacaaacacaaccgttagcatatcccaaaagttttatagtaccaactagaaatagagagatgataaaactttattgctaacacattgacgttacggacaacccgacacggactgaacaggagcatgttagacatgtattatggctccggaagatagaaaatatgcttacatccccatggtaggtaagatttctataactactggccactgaaaagtgaatgcagtaggcggcaaccccgcatccaaacttcaaccaa

SEQ ID NO: 545 - DNA, 883 bp, Antheraea pernyi iflavirus
  source 1..883: isolate = LnApIV-02; mol_type = genomic DNA
tccgagatttgttttttggcgattttgtgtgtaacaaactttgacagcttactatttaatttaattaactttactttataacatttagtttcaaaatataaacttaatttaaagatttttatgtattatattttatagtattattaaaatataaaaactcggtactgaccggggttgtatctaacaattaataaaagctatataatgtgttttcactatcggcctatcttattagtcttttagtagcatagataaatagtgacactggcataatcacccccagtggcaacacgcacctcttatatttcttttgttaaaatgatttacaatgtataaataataactttaaggcaaggtacagctacgtcctcgatgtttataagtatcatatgaagtgctaatatagatttgcaaaagccgtttgttttaatttaacgtcacctctaaggagtgcgtgtcgactttaaatcttcggtgtaatttagtccgatctataaaccccaagtaatatgtgaaagtaaccgctcaggcgtatgtgtgtatgacgrtattctggtctctggaatatcataattcgtgcttggctttgtccaaatcctcgagagcgtacgaaccaacggtcatcgggaatatacttgtgaacgaataaagtagtcatataagtatgcacgaactttggtctcctaatttctggaagttttgtaggaagataaagcttaccactcctttatattctttctttttatggtgacaattttgcaagtaattttattyacagtgtttctcattgctattaatattcaatttccaggtatcacttttcatttgcattcgattttcttttacttttatttcaacaatttgaatatccaattaatcaaat

SEQ ID NO: 546 - DNA, 551 bp, Isla virus
  source 1..551: mol_type = genomic DNA; strain = Cx 1773-5
taccccagattagtaacaaaatcataaaactcggtacagaccggggcaactagttctggttatttaataatttgtttgaccttatcttatgttcaatgccgtgttcgcttgcgtctttaaaccccaaaagatgttccccataagttttcaaattattatttaattagtggttgtgtataaatacttatttaaggcgaggcactttatgatttaatgtttataagtaagcggatttctgttagcacgagtttaatactatggtgaccaccgactagtaatcgagtactttagatataaggccaaaagccctctatatcacatatgtagtgtgttagtaaagataacagagagaagccgaaagtaaccgcttaatgattaagagtgtgacagaagaagctttcttcttaaatcatttcgcattgattgtgtaattcgatagatgtgtatctctacctatcggatgtatctttctaaaagatagatgatcttagaaccatcttttgactgttttatgtgtaataaaattgtcattccttttcaacttttcaact

SEQ ID NO: 547 - DNA, 886 bp, Chaetoceros socialis f. radians RNA virus
  source 1..886: mol_type = genomic DNA
agataaatacgggtgtagtgcagcttttgctgcactacactcgtattgatggatttcgcgctctaccgcgccgttttgcttattgaatgttttattacttctggatctcaggcaagactgcctgttattcgttgtttagttcgttttctaagcataatgtacgaaatttatcaagtgtgatttgagaataaaactcaacgccctatatctacaaacgattatgataaattgaatctccccctatctgttatttagattgtttgattttctttcaactttcgacaactatacagttatattatgggaaatctagttgtattataaatttgaatttaactagctcaatataattaagatttatatattgatattatttattgactgattcaccagagtctttcatgtgaactctatgttctacatcatgttttattcacatccccttccgaggtgatgttaaacaccatgtcattatggaaaaatgaccagagatagcctataagaataaactctgtttaaactcttttagatgcatggcttgccctgtctaatcgtatttcagcctaggtgactggctatataattaaagcgttaccacatccaaataagatgggatctccggatcacatcgcctgttaatatcataagatattgtaaactttatctcttaggagattgtaggtggtgagggcttaatgaccccaatacccacgactaccactttatgtgaaagcactttatcacgaaattagcgtgatggattatctgagacgatgtccacataatgcgctttgagtagattatggtatgcctgaattgatcacttccaagattttcttttcttggtatcgatcttttcagacaggcaattggactttaatatatt

SEQ ID NO: 548 - DNA, 384 bp, Apple latent spherical virus
  source 1..384: mol_type = genomic DNA
tccgttttagagcttgtgagttgttattacgttttgttgtttgaatctctgttttgttactctgatttccttcacgtttgcaccttacactctctaccgataaacattatcatcttttattttgaattttatttgaaaaatttttatattttcaatgtcaatcactactcctgtagtgattcgctttgggagttttgactcccctgctgcggcacagattgccgatactaaggaggaggaaactcctctctctcgccttgcagctttaaatcgcaaggctcaaattgctgctcgttcaagagtagcagctgctgcggcacagtatgccgaagagcaggagacactagttctcactgctcaatccatgagggatgctctcccttt

SEQ ID NO: 549 - DNA, 50 bp, synthetic construct
  misc_feature 1..50: note = sequence of 5'spacer
  source 1..50: mol_type = other DNA
aaaaaacaaaaacaaaaaaaacaaaaaaacaaaaaaaaaaccaaaacaca

SEQ ID NO: 550 - DNA, 50 bp, synthetic construct
  misc_feature 1..50: note = sequence of 5'spacer
  source 1..50: mol_type = other DNA
aaaaacaaaaaacaaaaaaaaaaccaaaaaaacaaaaaaaacaaaacaca

SEQ ID NO: 551 - DNA, 25 bp, synthetic construct
  misc_feature 1..25: note = sequence of 3'spacer
  source 1..25: mol_type = other DNA
aaaaaaacaaaaaaacaaaacaaac

SEQ ID NO: 552 - DNA, 22 bp, synthetic construct
  misc_feature 1..22: note = sequence of 3'spacer
  source 1..22: mol_type = other DNA
aaaaacaaaaaacaaaacaaac

SEQ ID NO: 553 - DNA, 19 bp, synthetic construct
  misc_feature 1..19: note = sequence of 3'spacer
  source 1..19: mol_type = other DNA
aaaaaacaaaaaacaaaac

SEQ ID NO: 554 - DNA, 16 bp, synthetic construct
  misc_feature 1..16: note = sequence of the first exon
  source 1..16: mol_type = other DNA
agacgctacggactta

SEQ ID NO: 555 - DNA, 51 bp, synthetic construct
  misc_feature 1..51: note = sequence of the second exon
  source 1..51: mol_type = other DNA
aaaatccgttgaccttaaacggtcgtgtgggttcaagtccctccaccccca

SEQ ID NO: 556 - DNA, 114 bp, synthetic construct
  misc_feature 1..114: note = sequence of 5'intron
  source 1..114: mol_type = other DNA
aataattgagccttaaagaagaaattctttaagtggatgctctcaaactcagggaaacctaaatctagttatagacaaggcaatcctgagccaagccgaagtagtaattagtaa

SEQ ID NO: 557 - DNA, 131 bp, synthetic construct
  misc_feature 1..131: note = sequence of 3'intron
  source 1..131: mol_type = other DNA
aacaatagatgacttacaactaatcggaaggtgcagagactcgacgggagctaccctaacgtcaagacgagggtaaagagagagtccaattctcaaagccaataggcagtagcgaaagctgcaagagaatg

SEQ ID NO: 558 - DNA, 21 bp, synthetic construct
  misc_feature 1..21: note = sequence of 5'homology arm
  source 1..21: mol_type = other DNA
accgtcagttgctcactgtgc

SEQ ID NO: 559 - DNA, 21 bp, synthetic construct
  misc_feature 1..21: note = sequence of 5'homology arm
  source 1..21: mol_type = other DNA
accgtgctatgtccacgtgtc

SEQ ID NO: 560 - DNA, 21 bp, synthetic construct
  misc_feature 1..21: note = sequence of 3'homology arm
  source 1..21: mol_type = other DNA
gcacagtgagcaactgacgga

SEQ ID NO: 561 - DNA, 21 bp, synthetic construct
  misc_feature 1..21: note = sequence of 3'homology arm
  source 1..21: mol_type = other DNA
gacacgtggacatagcacgga

SEQ ID NO: 562 - DNA, 741 bp, Coxsackievirus B3 (CVB3)
  source 1..741: mol_type = genomic DNA
ttaaaacagcctgtgggttgatcccacccacaggcccattgggcgctagcactctggtatcacggtacctttgtgcgcctgttttataccccctcccccaactgtaacttagaagtaacacacaccgatcaacagtcagcgtggcacaccagccacgttttgatcaagcacttctgttaccccggactgagtatcaatagactgctcacgcggttgaaggagaaagcgttcgttatccggccaactacttcgaaaaacctagtaacaccgtggaagttgcagagtgtttcgctcagcactaccccagtgtagatcaggtcgatgagtcaccgcattccccacgggcgaccgtggcggtggctgcgttggcggcctgcccatggggaaacccatgggacgctctaatacagacatggtgcgaagagtctattgagctagttggtagtcctccggcccctgaatgcggctaatcctaactgcggagcacacaccctcaagccagagggcagtgtgtcgtaacgggcaactctgcagcggaaccgactactttgggtgtccgtgtttcattttattcctatactggctgcttatggtgacaattgagagatcgttaccatatagctattggattggccatccggtgactaatagagctattatatatccctttgttgggtttataccacttagcttgaaagaggttaaaacattacaattcattgttaagttgaatacagcaaa

SEQ ID NO: 563 - DNA, 742 bp, human echovirus 29
  source 1..742: mol_type = genomic DNA; strain = jv-10e29
ttaaaacagcctgtgggttgatcccacccacagggcccactgggcgctagcactctggtatcacggtacctttgtgcgcctgttttatacttcctcccccaactgcaacttagaagtaacacaaaccgatcaacagtcagcgtggcacaccagccacgttttgatcaaacacttctgttaccccggactgagtatcaatagactgctcacgcggttgaaggagaaaacgttcgttatccggccaactacttcgagaaacctagtaacgccatggaagttgtggagtgtttcgctcagcactaccccagtgtagatcaggttgatgagtcaccgcattccccacgggtgaccgtggcggtggctgcgttggcggcctgcccatggggaaacccatgggacgctcttatacagacatggtgcgaagagtctattgagctagttggtagtcctccggcccctgaatgcggctaatcccaactgcggagcatacactctcaagccagagggtagtgtgtcgtaatgggcaactctgcagcggaaccgactactttgggtgtccgtgtttcattttattcctatactggctgcttatggtgacaattgagagattgttaccatatagctattggattggccatccggtgactaacagagctattatatatctttttgttgggtttataccacttagcttgaaagaggttaaaactctacattacattttaatactgaacaccgcaaa

SEQ ID NO: 564 - DNA, 742 bp, human poliovirus 1
  source 1..742: mol_type = genomic DNA; strain = mahoney_cdc 5 utr
ttaaaacagctctggggttgtacccaccccagaggcccacgtggcggctagtactccggtattgcggtacccttgtacgcctgttttatactcccttcccgtaacttagacgcacaaaaccaagttcaatagaagggggtacaaaccagtaccaccacgaacaagcacttctgtttccccggtgatgtcgtatagactgcttgcgtggttgaaagcgacggatccgttatccgcttatgtacttcgagaagcccagtaccacctcggaatcttcgatgcgttgcgctcagcactcaaccccagagtgtagcttaggctgatgagtctggacatccctcaccggtgacggtggtccaggctgcgttggcggcctacctatggctaacgccatgggacgctagttgtgaacaaggtgtgaagagcctattgagctacataagaatcctccggcccctgaatgcggctaatcccaacctcggagcaggtggtcacaaaccagtgattggcctgtcgtaacgcgcaagtccgtggcggaaccgactactttgggtgtccgtgtttccttttattttattgtggctgcttatggtgacaatcacagattgttatcataaagcgaattggattggccatccggtgaaagtgagattcattatctatctgtttgctggattcgctccattgagtgtgtttactctaagtacaatttcaacagttatttcaatcagacaattgtatcata
